United States Patent Application Publication US 2011/0189663 A1 - sequence listing, part 10

SEQ ID NO: 5703 - DNA, 874697 bp, Homo sapiens
  DSCAM gene - 40306213 - 41140909 of chr21; NCBI Entrez Gene ID: 1826; Build 35; sequence includes 20,000 bases upstream of initiation codon and 20,000 bases downstream of termination codon of the gene
tctctctctctctctatatatatatatatatatattttttttaaacgttttccactaggtatggttgtttcactaaagagagggtttatgtagctccttataccaccattccagaagtgtccttctatatgattttatgtgtttctttttgtttatatttttagatagttatttgtttttcagttttctgacttatctgtgtacttgagttgaagaattacatagtttacaaggtttgctacaaaatgacatcctcatctcctctctctattttccctaaaaaatcacttttaattctttttaattgatattaaaaacttatctccttgtttagaagtaatatatttatagaacaaaatcttttttaaaataatttcagttttattgccaggtgtggtggctcatgcctgtaatctcagcactttgggaggccaaggtgggtgatcacctgaggtcagaagtttgagaccagcctggccaacatggtgaaaccccatctctactaaaaatacaaaaaaaattagctgggcatggtggtgggcacctgtaatcccagctacttgggaggctgaggcagaacaatcacttgaacccaagaattggaggttgcagtgagccaagattgagccactgtactccggcctgggtgacagagcgagactccatctcaaaataataataataataataatttcagtgttattaacttcccatgatagcagatgaatactgagttctatttcactctgccatatctctgacatatgcttccgtcatgcctctctcaaggtagttgtcatattcattagatcaatactacatgttcatatcagtgtttctgagtagtcccaatattaatagctgagctatacagagtagtgctttctttcccttctcatttttaaaaatttattttttcctaaggttaatatttgttgggctctcttatttgcttggtttcccatgtcattattactaattccaaactctctctgatttatgtaattttcctcttactgtattcaagcacccagacatttaaagacatctccggagagcttctgaccagattctgcctgaacttgttgctctctgggcttaggatgcagctgcatcttaggatcctcaccatccttttggacagtcccttcatccctgtcttgttttagatcttctgttttctgtacctcaggtcttcttttttggtttctacttttgttttagtggagttcatccttcagtaactccctgataaagcaataggggggtaaagtttttcagaccttgttttatgaaagtatatttattctacttactaatagtttgcctgggcatgaaattctaggttggaaataattttacctatggttttgaatgacttggtcatctgttttctaacttctagtaccatttttaagaaatccaatgccatactgattctcaatcctttgtattaaatgtaacttttttttcacgaagagtttacaggatgggttgctgctgtatcctaaagtgtcacgtaagtgtgctgaggtgtaggtctatattcttctgttgtgctagatatttgatgggccccttcagtttggaaaatcatgtcctttgaatctgagaaagcttcttggattctttgagcatgctcttccctccatgtgatctcacctccatctggatatcctttaagccagatgttagactccatgggctagtcctctaaattaaaaaatgtcttatatctccaattttctttctttaattattttctgcttacaaatatgtttagtagtagcatttctttatgttaaagaaaaacaaagttcaaatgcccaaccataattatgttaaacacttggtatgcatatgaataaagacaaagggctgctgagcaaatctgaatttaaatagaggtgttgtaggtataattaaccgtaacttattttttgaataagtaagaataaagtcactggctgcaaaggattattagagatgtattttccaaaattcatttatctggactccctctccccacctctaccccctgccaactgagcagacctcccactattaaaccaaaatgactactcaccctcaccccccagcagttataatacacaacatcactgccccaccagatcaggggaacagggcatttggcctgtggctctgcaatctttatcctaatcttgttccagcttcaagagcctaacagacgcctgtgatcacctgagacttcttaaacagcaccgatacttctatctggttggaaccttaaatgccaccactcttcagagacaaggttctcactagattctaaatctgttatttaaattacttttcaatttagaaaaggagagagagaagaaacttattagaataaggccacctaggaatgttcttaacctctccattgagcttttggctgatacacgaaactacacataataaatacaacttttcttccaggtgcacagctaaacaacagcttctggcacttgatctccagtgttcagaaagacgcactgcccagagtcaagctagtgtgtagatccagtggcctctgccaatgagggcttgccagtcatcagaggacagacaaataggatccagcaccagttattgggccttcccgcctgttgagtttcacaggcaggacgtgtgtgaggggagtagcccatacttctgttgaaagatggctgtagtactctttagggcacagatgatgacaaactttccaggaacagataagtcaactgcagtggagcccaggcaacattcagggctctggccaaccctgatgtgtcccgcatcaatgaatgaggacaatcaaagccagaggtcttgagactcctcaacattcagagaattggcctgggagctgaggctggcactggagagaacaacaggttccccaaacacttaggccaagtcttgcataaaggcatgattaggaatccaaatgcctacaagaggagtgaaggtgttcttcactccttcaggagttcaggtacttgtcccgctcttctaagcattccatcaccaggtcactggtcctggcaacaggtctttcaagagctccttgagtactctcccatggcaggaccttgtgcattcctgcatcctggcatggagtccggagcccggcatatgttaagtgttcagtacacatttcccattccagactccttggggagcctggacaagcccttcctgctctttctttaaatttttgctttaatttctagatgacggtttccagtctttctattgaatttttcaattctgctatcatgtttttaatttctaagaactttacttttgatctttgaatgttccttttagaaaaataacatgtattctattattacagatgtaatattttttatcttctctctctgagggtaatggttgatttaatgacattgtcttcttgccaaagagtctttttcttttatgtcactattttttcgtttttgtttatcttgctcactgtcttttagaatagattttttttaatggcttggctcttttgaatatttaatctctgcttgcacttaagaattgtaaaatgctggttggcagctcattgacacccatggactcattgactctctagagcagtggttctcaaagtgtggtccatggagcagcagtgtcagcattcccgaggtgcttgttagacatgcatgttcttgagcccctctcagaccttctgaatcagaatctagagtgagacccagcaatctgcattttaatgcctccctcccaccataattgttattcatgctacagttggagaagtactgaaaattaagggtggtctgccttggtggcttcaatggggggatctgcatggcagtatcttagtgtctcttttggactgaccaggtatcacagtgtcatctctggctgccagactcctaagagcctactagagaaagaaggtggggaatctcacccttcagtatatgaacatttctttaacatcctgttttcaatttgaattccattttcaactgtgtctggtgtcattcaatccagagactgtttatctctctctagaatcagaccctgggtcttcagtcagatgacagagtggcagttcccttttgtccctcttgctggttctgctacatcttgccttcagttgtcttggtttcataatctcccatgttggctcccacattccacacagagcccccagagctctgcaggatcagctgctgcctgtgcctcctgaccctcctcttgcttcccacactccagcagaccaggctcccagccattcctggtcactgcagcagccctccttgctgagggccttggcatgtgctttcttctctagcaatgctttcttcttccatcctccttcacccagtctaattctttactacctgttaatggctgaaatgtgtttctctaaaagatgttgaagttctaacccccagtacctgtgaatatgaccttattagagatgatcaagttaagatgcactcattatagtggtttctaatccaatatgcctgacgtccttataaaaaggagaagcctggacacggacaggtgcactgggagaatgctgtgtgaaccccaaggcagagaacgccatgagaacatgcagcagaagccgaggaacacccaagactgctagcaaatcactagacgctgagggtaggccaggaaatgatccctctctcagagcctcagaaggaaccaacagtgctgacacttgatcttgaacttctgacctccagaatcgtgagaaaatgcatttctgttttgaagttaccctagcatgtggcgctttgttacagcagtcccaggaaagtaagacaccacccgctggtcctcctcatgatgctgtctgatcactcatccttggttaggacctctttgccgtatctccccacaccttacactttttcacccaagtactttccatagtaccattatttaattgcaatttctttaattattcaaatgtttcactacttgtgcaattcttggttttatttgcccccattagtcttcttgtcagtcctctgtgcatgcaggggttggggtcatttctgtcttatttaccaacataccccaaccacttagcacaagatttggcacatagcgatcttggttagctctggtcgaaggatttaattttctttgatttcttccgtctccctctccttgagggtcgcattagatttagacgtataaagtagtctgtgaccttggccctcctactggaaaggaagctccaggtctgcccccagctgtacttactgtggctggccacttactgcccttcctgggctgctgtcagggaatgagggaactggtcttcacttacagccgtggcctccaccaggacattggactcacccggggcttataaaatgcagacgccttgtcttcacagcagctcaagctctctaggtaattctaatatgggaatcactgaatttgagcccatttacacctatcttaagtacagtagtaatttatttggtcacttgtattcctagttcatagctgattaaaaaccagaagtgaatatgggggctgggtaccagaaactgctcccaaacaccaaacaattgagttccgccaaatcaatgggaacactaagtatagggacagatgggcctctgacctacactgtaatgttcacaatgatgggcttaagtaaataagaaaactttagttatgctctgtgtgcattccttaacaaggtggaaaatgataaatcactaacagtgccacattgagctcttctgatgtaccaggcacagctctgagcagagatgatatttgatttaaaccttacaagaaccttataggttatgttttgttgatattcctatttttcaggtgaggaagctgaggactagagagagccagtgagttgttcaaggacacattactagtaataggagggacaaattcaaatcttcatctgtccaacttgaaagttggtaatataaatgttttttgagcaagttcctttttttcccataaaagagaaatttttttgtgaaaattcatttatgatggcattgcctaccagtgccatgttaatgacactaccagtgttaatgacctaccaacaccatgttaatcgtgtgtttacttaaaaattacccacaagaatgaattgggtaatggatgacaaatgtgaacttttcaaaagttatttaatttttattcagaccacactggtagataaaaagaaaactagaagtgattctatggtgttttactcctttgcaccttctgaagagaagcagatgctttactgagttgtatttgctgggttttcccatctgattaacagtgaatagcagaaatgtgctcttttacctcatcttcccttttctggcctgctttgaggctctcttggtaaaatgtctggcctaagacaggacgttttttgtgggctggtccagaccccatctttgcctcactttcctgcatggtgagttcagatcaggttgctattataagctgattctcataaaagtctgcgaataagaaaaaggagagcttgtagcactgggagatttacattcctctcctggtagcaagaaggtcattctgaatatctgtttgcagggaaatatgcagtttgtgctttctctgcaggttctaaggtctctcctctaaaatggattgttgcagtttcttcaagggagtccaaacagggaaaagagaactggagtgaaagagcgttttgtattcgcccacacttcctcctctactagttgattatgaaaacccccaacctaacagatggcttggtgcagggctctttgttgaagatactattattaacagatgaaatgcatgtgtcctccacacagacatctcaggagggcagctctccagccagatgacggtccaatattctattagcttggtgtgaaaaggagagaatttttaaatcagttactttcactctgaagtgcaaggataagatgtaattctgcatttttcttttcctaattggaagaagacggcttctaagtctaaaagtttactttgttggcatttgactgactaagactctagttttggtggctggagatttaaattcatattagactcattaagaaacacaagtaaaactttcagagtagaaatgaatgggcaatccccaaataattcagtggtactttttagcttattgagccaaatatactgataacaacttttaggcatccacagttatccaaactcaagtctcagttggggttacgtttgtggcttctcagagttggacgggacctcagaaggctaaacacatttgaatgtgaggaatctaaaaaagtgaggaattaccagcacttatacagtaattaaaaaatcagattagagttggtttggtttttttttattattttatgttaataaataacactcaataaatagtgatcaacctgggttgctgccggggaaaggtacccagaccttgtaacacttaaaatatatgcaaaataacttaaaagtcttgatcacgacactgtaaaaaggttgaaggaatgaatttccaactttcctgctggttaacgagtggagatagaaagggagatatgtgttaattttgaggaaacttccttcttattctttaccacacagctctactgggtaatttccttttgagtcaactgtagagtgaagaacaaaggcttagatatctcatgaaaaattcactggctgtaggttcatagagtatccagcactgtccaatataactgtctgcaataatggaaatgttctatatgtcagcactgtttaatatgccagccactcaccattgtggctactgagcacttgaaatatggtgagtgcaactgaggatctcattttttttaaagtttattttaattaatttacctttaaattgaaatagtcacatagctagcaactgacgtatttgacagttgtagaaaccatatataataaccccttaaagttcattggtatctttttataattaaaaagtagacttgtgcatagtaaaataaaacaaaattagtaagaacacatctatttaataaagaaggctatttcatgaaattatatatcccttctctgtcctaccccagtctgttttttgagatgcaactatggataacagcttgttatagatctctccaagagctttctatgcatgtataaacagagaaatgaatacacatttctttatgggagtgggaacatacagtatccactaattttatttcattactcttccagcttcaaaacatctggagatctgttatatgagccctaaagctgcctagtcattttaatagctgcataatattccataatctagatgaattattatttaattgttccctgatggtggatatttgggtttttcccatccagttgctatggtgtaatcacagaactgaccattcatccagttatatttttgcatatgcatgtgtggctggtattttcaatgatagtaaattgcatgagaagagaaatctcagagacaacaccaggatgcaagtcatttaggatttaataagtttttgtccttgaaatgctctcagaaacaaacaagagtgagtataattttcatacagtgagcataatattgactgtaagcaccatgtgagaaacagttgctgtctgttttgtccactgatatatactgtgtgttcacagtgctagccagtagcaggggctgaataaatctttgttcaatgaataggtagatgtcctggttgtggatcacattctgagtctttcacttgctttggaaaggatctgccaaagaccgaagagattaaatttgtcttaaataacaaaggccattaatatctctcacagtcacatgttatttagttttcagttgctcctcagccatccttggaggaatatccattactattcctagagaaatagtcatgaaaaagttaaaataccttagaaatattgagagttgcttttcaaaacttttcttaagatgtgatgaaatcatataggcattggcaaacagatggcattagctatggtctggactgcgggtgctgcttctagttgctctcagtgggccttcctcagctgagagggcactgccctcagccaccctggcacatgccatgcctctgcaaggcaaaggatagaaaccatgagcaaggcagtcaagtggacttgaatctggccctttccttactctccaaccacagatctccataaatatgctatgcccttttttctgtaaaccacttaccatccctcccattcccaaaaaacgttcacttctgcaaggacttgctctgtgtaagtgcagaaaacaggttccatctcccgtgtcacttcctttactctcaactgctgtttccatggagttttgtttctgacttctccctaccccatggcccggccttctggaggagaatgaggaagtgaacctgatggggtactgtgatggttaattgtatttgtcaacttgactgggccatggggtgcccagatagctggtgaaatattatttctggatgtgtctgtgagggtgtttctgcaagagacttacattcgcattggtggactgagtgaagtagatggccctctccattgtgggtgggcctcatccaatctgttgagagcctgagtagaacaaaaagaagaaggaaggttgaatttattctctacctgatcccttgagctggggcatgttttctgccccaagagtttctggttatcaggccttcagatccagactggaatatataccactggctctgcagctctcaggcctttgaactacaccactgactttcccaggtctccagctggccgatggcaaggtatgggacttctcagcctccatcgccatgtgaaccagtaccgtacagtaaattgctctctctctccacacacatatatgtataggggtgtgtgtgtgtgtgtgtgtgtgtgtgtatgtatacatatagtctatatgtctatatgtagtctataatataatatatgtatccaatttgctctgttttctcttaagaaccctggctaatataagcatgttactttgtttagagattttaacaatgagaaaaggtcaaaatggcctcttatccaacacatgtccactatagtgggggctgcagaatgaaacacaccttcaaggctgcttatgaactctcaggaggatatggatgacatgagggagaagtgacaagtgatatgggaagaatgggcctgtggacccacaactgtgatggaaagtgggttcacacccctcactaaaggtgctgctaggtttcaactaggcaggacctgaaagatcagaagaaaaggagacaagagaattttgacttttaacttagttccactgtgtacctgacaagctgttcgctgtattgtgctacacaaatcttgtcaggtttcataatttacttaattttgtttctttattgccttttaacataattttagattttttaagaaaataaaaagaatcaaacaacccagaaaagtataatagacaaagagaaaactggcttcccactacttagatagctaccattgccattttaacagttatattttacataagtgaggttatgttatatgtgttgattttctaaacccctttcttttttttgttttttggttttgtttttgtttttttccctttctcctcctctctccacctcaacccaatcaggtaacaaatattaacatttgctgtgcaacattttttcacccttacaagatttcagtctctctctctctctctctcacacacacacacacacacacatacacacacacacgtgtattttacgaaagtgagatatttcatgtgttcttctgtatcttgcttttttcgcttaattaaatgtggtggaaatgtctacacatccctgattttttatgactatatttaattcaacatccctcgaggataggcatttggatggcttcctcccttcttcctttcctttccttttcttcttctctgtctctcctctttctcttgtttcagcaaactattcggcagcagatagcactgcccatacagctttaggttctgctgatgttttatctcaatggaacagatgcctaagactaagactgcaaagttgaagtgtaggtgatttttgttttgtttgtaaatagatattgccagaatccattaaaattaaaaacagctacaaaagtatcaaattgccaccaacaatgtccacaagtatcctttccccctgtgtcccaccaacattagtttccttgtcatttagttcttttccatgtggaggatgagaagaaatatgcaattgttatttaaatgtacatttccctgcctattaatgtggttcagcttctgctcaggtttattggctgttttgttttcttttcctctaaactatcatattcaagtcctaggcctattaattgctttttgttatcaattgttaaatgttcaaccttatattgatattagtcctctatcttgcaggtggtgagtgtgccccttagtccacccattacttgtcttctggctttgttttggtcagaagtttgccattaaaagaatattgcagttatttgtcttttattttatagcttctgggcttatgtcatgtttaaagatgtatcctggccaggtgcagtggctcacacctgtaatcccagcacgctgggaggctgaggcgggcagatcacgaggtcaggagatcgagaccatcctggccaacatggtgaaaccccgtctctactaaaatataaaaaaattagccgggcatggtggtgctcgcctgtagtcccagctactcaggaggctgaggcaggagaatcgcttgaacccaggaggtggaggttgcagtgagccgagatggtgccactacactccagcctgggtggcacagcaagactccatctcaaaaaaaaaaaaaaaaagatgtatccctggccactgtgttatacatgaacatgctgtctccagaatattcttctatctgaattgcttggtcttacattttgcttatgactcaagtatttttcttgtatagttttttttaattagcatttttaacgtgtctgaaatgaagtaagcgtccaattttatctcatccccaatttcttagacttctctcaagccactaaaatttggtttatgtaaatgaaaaggaaatgtctgtatagttttcttgtttatttctttccaacttctgctttctacatcgccttccttcccgtcttttcctcattcttgatctgtgtttgacactgttccctttcttctgctcttgcgtcaaggcatagaacctcactaaacacagcaaagctgtagcatcaataacaatagtaaatacttacatttatgggatcttttgctctgcgtgctgggccctgctctaggcgcttggcaggttttaagtcatgtgattgtcatagcagctctgtggcataggtagggttaacagaccagtctttagaggccagaggtaaagccacgtgcacgggtcacctcgctctggctcaggctcagcagccctgacggagtctgaccccaacccaggtcttaaccactgggctccagaaccacatcactcctgcagggaacacaaggctggcccctcgcctttctccacgtagtgttttgggacccctgcccctctctgtttagcacctccccagtgaggacggagctcctttagagaccctggggcgtttcatcaagactgtcttccctggtgtctgaaaagctgcccacgaagccacagagctgagctgtggctggggctacggggtcatacaaggatccctgagctgcttcctcattctgctgcccttggggccacgctggatcattccccagacattgaaagccccgtgctaaaaccaggatttctccgctcatctcatctggaggcccctcctgtaaggaggccccagggacagctgcctggcacgcctggcgcctccaggaactctgtatgaacaccgttctttcaagagggggccgctgcacccctccacgagagtcccggggctggtgggggctcgggtccctcaggcagatccaggcccgcacccccatctgcagctctccccccagcctcttccctcagcgtcgtccttcccctcaactgaatcccaatgggctgtcatgatcagcgctctccacacaggcttatgtttcggtttgaagtcttctctgcttctaaaacctatttgatacaaaccccgccttgaccttctcttataattcaaatccctagactcagtacctgtcttcatttaaaaaaataacttgttagagtgcctatgagcaagccacctgcccagtgcggagtaaagaaatatttattttgatgaaatgtgtatgcaagttgataagctgatttgacatctaagaagtgttttttttttaaattcccttccatctgggttttttttttttttctatcacaattctatgtctcccaaggtgtgaaatgcaggagatgtcactaagggtctctgtgccttgcctcatgcaacactttttttttttttttgatctagtctctttcataattcagcagatattcattgagcatttactatacgctaagcattattctaggtgtggtgagtgcagaagtgaacagaaagacaaaatctcagctttcatctaagaagataagcccgtaaataattacatacatttataaatcaatatagtgaaaataaagctcagcggatacacactggtagggtggagaatgctattggtgtgggggtttgtcagggaaaggctctccgaaaagaaggtgtctgcataaccagtgatggcagtgggagggtggcccctggggtgcctgagggaagagtgtgcgcttgtgctgagtgtgcctgcacaaaatgcaggaagccagcgctgggtgtgtgagcaggaaggtggcaggggcaggggatctaccctacaggagctggtgctggagaacacagggctcatggccatggtgaggacttcggatttcaccttgcatgatacagggaggcaatggagagtttgatcagggcttccaatgatattgtgtgtgtgtgtgtgtgtgtgtgtgtgtgtgtgtgcgtgcattgcaggatcaaggtggctgctttacagagaccaggctgtgtgtgagagagtagaagtggggagaaatgtaaaagcccatgggagatgatggggttcctgttcttggtcagaggctcctctgtccacacaagcatccaccatggatctgtaggagtcatcttgccatcctccccgtccctccccacatgccccaactcttccctcttcagaaggggactgatcattactggacctctgggtgttgtgcttgggttcagaccaagctctgcccccaactggctgggtaatatagtgcagggttctggaccgctctgagccaaggcttccgcatctggagggcagggaggagagaagcagtgctcacctcccagaaaagaattgattttgtgagcacagacagcacgttgcctaaaactgaacatacagatgttgaatgagtgtcagtgacgagctaaaggcctcatgtactgagaatgatgcaactgttatttaaagtactattaaagtatttccaactcctgatcatctcaccttttaaatgtctttcactattatctgcggcaagtggcttcatcccagtcctactgcactggtcaggtcttcctcatttcctagaaagttctccctgcatccttctcacattcctcaggccattatccagtgtgtccccagaagggaatgtttccaaggcatacccctcattgtgtcacttccctattgaccatacatcagtggtttcctttcgccttcaggatggaccccaactcctccttgcaaggggccttccatgactgtgctgtgtcctgccagtctgtctctgtacattcagctctctctgccgtggggcaactgttccttcgtgtacaaggctgaagctaacagagtgttcaggactcagctccggtatctgcagggaagccttccctgcccactgtctctgccacacctgcttccaccacacacacacatacccacccacccaaaacaatgcacataaacacacaccacatatgcaaacacacaaaatacacacacacactaaaatacaaacacacaccacagaaacacataaacacaaacacactttcacagagaaacacacacagtcacaaacacagataccacacacacaaacacacaccaaactcagaaagacacacatgtacagcacacacacaggcacacacacaccacaccagctagttgaattagatgtgtcaactcccgattatataatttatcttatcaaattgttgtcactattatttgaatttcccacttgattgaggttagtagatactgtgttttggtctttttttttttctttttttccacacagtaaggcatgtaaagtacataaggcttaagtgtacagcgtggcaaattttccatgtgtattttcctgtgtggtgtttacccacacccagacggagaacatttcaagcagcccagaggctccccggtgcccaacccggttcatcctcatccatctttagcccccacagggactactataacaacttgtagataacagacttatgccaaatatttgttgaaggactcaatcagttcattggaggaagaaatgggtgggtcgctgctgacattcttgatcatctctgccgtttgcagttctgagaccagaggtgtggcagtgtctggtttcaatgaatcaaaacaccctatagccagagtgaggctttgccaagtaatgtgtttcctcaaaatgtttctataggttcagttgtaggctgttatgacatcatgtagtggttatctgtgtaaccttctcagagccaactcccatatctcattgaatcctctcaacaatcttctaagatcggaagggtgggtatgattactcaattttccacgagaagaaactgagactccaagtaaagtctgagctccttctctgcacagggaagcaccatgatggtccctgatgcacacggctcaagagagttataaagcaagatgctggtgtcctcacccaaatctacagaaacccttctctgccccttgccatttgacttcaggcatcttgatcctgttggggtttaactgtattcccttctctccaaaagatagggtgcaatcctaacccacagtgcctcagagtgggaccctatttgaaagtagggacatcaaaggttgcaaatgtaataagttgaaatgagatcatactggagtagggtgagtctctattctaacataaccaccattcttgtaagaagagtagagacgcccagacacttgcagggataaagaaagccatgtgaagacagaaggtgagatcagaaagatgcagctgcaagtcaaagagtgccaaggatggcagcaaccactagaggctggatgagaaaaggggaagctctcctgcaggttgcagaagaggaggttcctaccaacaccttggttttggacttttagcattccaaattctaagacaataggttcctgttgttttaagtcacccagtttggggacgtttgtttcagcagccctaggcaactaatgcaggtcccccatgggaaactccttattgccttgatcagaatgaaccccacaggtccagcaggactgaggcttcccacggtggagaccttactgcctaaaatgccctccttgctcatccctggcaacattcaacccccaacccttcctttagcacaaggctcaaaggccattgcttcatatatgctcttcctggttctccaacagaaaacagaggagtaacagatgctatacttggatgatgtaacctggatgatgtaactcctcaaatgtgcattgttccttatttagcatcagtcaagtgagcaccaaggtggcctctttgactttacctttcttcccctaggatggctgacccagagctgcaggaagacagaactggggaagggaaaagtctggatggaattgtttcaggtcaaaggttgatcttccagaggctacactgattaggaatacaaaaggaggaatcactggaaacctaaggtattttataaagttaacttttccagatgtttatactctcagggcagaatcccctgtccttgactcagttttgcatgttgacatcttaactgaatttgaaagctcaacgttcttgccatttcctctgagacttctatatgaagtacagtactcactttccctcctaaattaccatggcgctttatgtgtacacatgtgtgcatatctgaggacaggctccgccttctacctgcattagagatctccattccagcccacaaatacttaccgagcatgtacttgggccaggccatgaggataccttcctgaacaggaaagagtgtctggtctcatggaactcacagtttagtgagaaataagtatgtttcttactgaagtctattacgtaaatacatttgaaaagacactggtgcatgtgttaggcccattcaaggtccttcacccattcaccctgtggcagatgcattaatagacaaccacggagaggtgcactcacacggggtcccatctggtcccaggcaaagaagggcctgcacttggggttgaattctctgtagtcaccatcttgaaatgtttaatgatatcacctctgttttaccttttctaaatccaatgggacaatggagcatgaagagggcttggagccttggcttctgtaccatcctgctacctgccacctgccacctctcctttgggagaggttcttggctgtccacttcccaaccccatgttcccccagctcttgagcagcctctgcccctgcaattgttgctgcttcccaacagggtggcaactgcatcattttggaacagcaagcctgtgttctgccaccacctgccatctctggtgagtgtatgggcatgtgtgcaggacaagcactgtgcaggagttcagagaaaggcctcgcagtgaccatcccctcagcaggctggcagtgccagggcacattccacaagtggccagaggcttgtgcccacctccaatccagatacccagagcttcccagcatggaggttgcaatccctgagggatctcctgtccactgtacattgggacagtgggctgtgggagagagacagtggcttccccaccccctaactgtggctggccacagcatgtgggtgcagccaagggcagggaagcaactggcaagtggaagcctcttgtactgcactgagtcacctggaaggtctgtggggtctgtacaggggtgcattcccacgcccaaggaagagcagcatgtagcagaaaacaccatgactggttgagagaggcaggaagaaaggaggaagtgttctgttttagcacttgttatggtgcttctttttcattttgagaaaggagctctccattttcattttatagtggaccccacaaatcatgtttccagccctgctcccaaactcagtaacagttaaccacagccatcgctaactacagtgaccatgtgctgtcaacggatggaaagatcttcacacctctgtgagttaagaactgtgataatttccagtctgcatatgaggaaattgaggctcgagtcacatgcagaagccccacatcggggtagtggaggagctgcaattcgaccctgggtttccctgaccccagtgcctgggcacccttgcaggtggctagtgtgcaagtaagaattaatgaataggtcaaccagccagatgcagggacagaatcaggcccatcccctgccttcctgggttgcatttgggaaggaccagggactgagcacccagcatttgcaaagccagaggatgctggttctggtgcgtggtactgggggctgggcctgcgcagcctgagtgggcggcagcacgtgatcacctgcagctgcagagccgtggtgagccaggcagcatcaccggctcagctgacccttcctggtacacagggcctggccatcttgtgcccaaccctggtaaagcaccattttgtttctgcctcaccatttgcttctcctgtgttttgtgagctgtctgagatgtgcatcattcttctgtatttggagggggacatggagcccagttaggatacctagtgcctaggaaaaagcctactcaatttcccttgaaaatgtctcccttgacccccaccgaatgctttttttcagtcctgattgtcctgactgtgagcattccatcctggcttctacactggggtgcattccagccctgtcggtcattatattgcaaagtgatggatagatgtacgcccttgtgagagctttaatttaaatattatcatgacttcaagaatcatacagaacattcaggaaatgttaacatattgacttttcacagaaacgtgaaaggggctatatgtttgggattactcaaattatcagcaatttcaatcagcttttttatgcgccattcagagagcaaaattagaagtgcttgtgtttgcattctaccatgtattcaagataattaaaaattagcccgtgaaatcatagagatctttacagtagcagcaaggatttggaaggagcatttccctctaagcaaatgaactggacttttctgagagtaaatacggaatcggaatccagctgcacattttattaaaactacgagcatttcatgttcacctctccgtggctggccaccttccgcaatagtcaccccggccatcccttattagcaaccggcaggaaaataactaaaaataagcagctgttgaaatgattatttaagcctctaagaaattcctcctgatgactgtgcgtgactgtgcggtggctgcgctctccccggtcctgcctcagttcggctgcacgtctctgctgctgctttaagactgcagagcgccccagcggccagaggcaggggaggggtccctgctcgcctccgcgctcggcttcactcgcccggctcgcaggcagggaaggttggcagagggatccatgtgactgaggccggagcacggcaaagatgagcctgcccgcccgcctgctgcctggatgcggagggtgagggctggcgcacgggaggccgctggctgcgcattctgggcgccgagtgcccgggatgagctcacgcccgcgtctgcggctctctccacctgccgacctgccgggggcccactgagctgacggcgcacctgggctccggccgcagcgtggggcgcggcgcccgggagcaggtgtgcaggagcgcagcgcgcggcgagcgcagccctcgctccggagcccggccgcgccgcgtgcccgggcggctaggcagcggcggcggcggcggcgggcggcgggcgggcggcggcccccgggcaggtgccgagcggcgagcggagccgggccgggcggagcgcggggggcgaggccggcgcgtcgctcgcgggaggccggggagcggcaggggcatgtggatactggctctctccttgttccagagcttcgcgaatggtgagcctttcggtttgtgatgaatttcgtttccttatcattgaccgggggggcgggggggtggggggtggcattggatgcatgggtaaagtcttctttctttttccgcttcatctgtgtttaaaatttcgtgcttttatttattttttaaatatcatatttattttttgggggagaagaggtggcaatggagaggcccgggagaaattgctctgtaatcattggaaggcgcttacctagccaagtgacagctcagagcctaactccagtactagagagctgcctcattcagaataaaccaggtttggtgacagaaggagagacaggaagattgccactttgaatattacaacctggaaagggatgtgacattccaagtgcacgcaagtggaggggtcaatgaggaacatctcccttcagattcaatgctttttgagatttttcaaacacgtaatttcatgctagtacaatgtatctccagcaccaaggagggctttaagaatgttctgtccttctatgcaccccgtgctgcttcatgctcctcacagtcgtttatgtaaaaatatgcactgataagcattacatcatctgaaatgttgacaaattaaaaaaaaaaaaacacctgtatagttgtaaaaatgaaatcagtgaatattgtaaatagcatacatttcctcatgcccagccaatattatattttgaaatgatttcttcctgggtatttagaaagctattgctcttgactgagtcagacccaattagtaagtgtgactgcaccttaggctgcctgtcaccgcataaatatgaacttacatgtatgaatggcttcctctcttgtgggaaccagaggaaattgtcatcatttgacatcgcctgggagtagctacggcttaaattcccatttcaaattttggaacacacatctgcataaaatgtataacctactgacagttgaaattaaaccattaagcagaatcccctagccagaagagaggagagagagagagagaaagagaggagggagagagagcgagacagacacagagacagagagagagagagagagagagagagagaggagaagaagagaaggtaaaagaagagaagagaggaaatctggcccttgtgagaaaatacgagaagcaaaggggaggctctaagattttcctggaagacacacagggaagctctgtgtgttggctgcaaggcagtgcattttctttgcctacctagacagtgcctaaagaatcagcataccaacaggccagaagaaatgcatgagcattgtcaattttttaaaaaaacggtgactaagaaaaggtagagttgaaagaaggtactatcaaaatgaacatgaaaatgatactttgctctccagtataacctaaagcaaagtgtttgaaactttcattttgagatttcctagcaggaaagaattgcaacaagttctgacaagacacccatctttcccagagggcaccatacctgtcctgtgtcctcctgggaatttcccttcagggacagatgtgcttagggaacatgcggagatgtgtcggggaagtcagccctttctgctcttctgctaatgcgacctcctaagaaatgtagagatgcctacacatgtgttccaaagacacagagccttgacaccctgtttcgcctgtcagggagtacctttctgaactccttggaaaggcctgggttataagaagaaacaaaatttgcaccccattgggaagtgtgtgtttcaggatgatgaaagaggctgtgctggttgtcagtcagccagtatttatttacagttttagcattttgtatgacaaaatggtatggaagaatttatgatactgatacagactattagcctctgatacagagatgctatatgtgtgtgtgactttttttctgaatcagcattttataactaaaataaacaatcatagaaataattatatatggtaatacaattatatgaaacctcaaatattctgcaatatgaaaaatatatgcaaaaattatgtaggtactcatatagtgagttctgcaagtattattttcaagacttttaaaatcaactgataatcaccattattgtaataaatataggtagattccacaatattagacataaacagcaaacacaaatgaatattttacattgctgtattacgtattctgatccaatctagcagaaggctatggaactgtcttgtataaaaatgcccctctctttatatgatcaaggatgaaaacattaaaagcctgctgtaaagctttaggatctttgaaggggggaggggaaatcagctttaaacagttttctaaggtatggtgttcattacatactggggaaaggatcataaaatatatagacatgttgaaataaaataagaatccagtttggaactatgcctgtttgtaagaccatatttcaaaaatataagagtaaatggtttctacctatctgaattaaactttaaaaaattgagaatatttttgtcaacaactgtcatattttgttatacctcaactttgaaaaatttctgaatgtgtgtgataaaagattgatgaattctaatacctaaactgattattgctaggcctcaagcatcaaaatgcctgacatgataacttttttttttcatttgtaaaagattatgtagtttaatatttggggctattaaaataagcccacaatacatctgcattttaacagtagacaacaatatttttcttattgatgtatcagaagtacagttatttcttaataaaagtatggttgctagacaggctgcaggcagtatttttgaaaaaaaaaaaaaaaaaaagaagaagtcagtgaccaggcccttcataggttaaacccttaaatgaatgacctcacctgatgaggtgcagtatcgtgttttaaagcagtcaatttgttctgcaatgttctggaaatacacgcgagcttctgttacagtgcaaggagccaaggtacacgtatgtgcagacactcacccacacacgtccctcggtgtcttctcagcaaagcttcctactgcattgtgtttcattaccatttctcctggttttaaccccagagcacattctagtttaaaattattgctaaaagaagagccaggccttcagacaaacagaatgatgaagaattagatttattatatgtaatatagttttgctagtatcctggcatctctgtttttacacacacacacacacacacacacacacacacacacacacatgcatgcattcctgacatcatcttttcctgagctgtgggattttcagttctactgcatccgctttcatggggcctgagggtcatggagattagagacggtggggtgctgggagtaagaaggtgctcattaaagagaagatgagtatgcagcacctttgagcttcatccattcacttgataggaaattacagagcacacgcttgctattttatttaattagaagcagacctttgtaaatacaaatgcaccttaaggacttcaaaggtgatttttatttaattcacataaatgtatgtaaggaagaaatgttatcaggtgaacaatttcagggctgcctccacttccctttctcccccatctttattaaacagattaaaaagctatccataatctcagggttcacctaaattccgaggccttttaacttaagctgcatgcccctccaagatgccctctgtaggaaaacaaaatgccacgcagaccttcaataaatgccagtggatcgttctccactttttgactctctcctttgtcattttggtgtgaccacggtttgctgcctcgggggatcagtgagtcacggggggcagaaccagcgcaatacagcattctggtaggggaactaattttgactaaaatatttgccaattctaatccccaattcctggacctccgggtagctggcaaggtattttatgttagatgtgtctggagtaaggtgcacggagtatttcgacaagagactcaattcaatgcgtattaaaacttgattgagagagggagagagagaggtcattttataaagaaagacctgtgaacactgtagattggaaatttatgtttgcaaaataaaaggatgggtttatcaagtggatgcatttacaaaatgtggcatccaggtttcgtaaaattagctgaattctacgggtaagattatgaatgtggctcataaataattaataggtagtgaaaaagaatgtattttgcattaggcagtgcattcaatagtatttcggaaatgagcacttcgatttcctcggtttccatgcgtggcccacctctccagagcagggcaggcacccaggggtgtgcccacacaaacaagcgcgtgtgggcattttcttggctgctgcgctgaagtgcacgctgggccttggtgcccgcaccctcagcctgggagatagggaggtggtgctacctgcaggccgattgtgtccccgccataggacactagtgggcggcaaacctcacaagactcttgcagccagccttcagcagagccagcaaacccagccgccaccgagggaggactgctccatgcagatggtcaggggctttcttctgaagacgcctcccccacgatctctcaagttcactgcgcccaaactccggcgtcgtagagttcgtctaacaggaaccgggcaaaggcaaccgcaggtcaggcgaggtccagcagcctttgttttcaactgtacagcggaggaccgtattcacagcaatatctagaaacctagaaggtgcccagaaaggaaacacaggtgttgcagcgggtagcgggcccgcagaagggtgcatttgcaccccctttccaaagccgcgagggaaccccggcgtggcgcgcgcctcggaggtggcagctccgggagcagctccgcgcctgattggctgaccttccaatgtcattccaggagccgccgcttctcctgctgatggtgacaggggtgatgctgacgtgcccgctcctccgcagtccatcaatctccgcaggcaaggctccgggaccgggagcccccttccctctcccccaggcccactggaaaacacctgttcccctggactggggggttaactcttcaagttccaaagacctgggcacaaaaatgctcatcttatctctccgcgcccctccccccaactatatttatgttcttttcttcaatgttgtgaaaatgccagaaaattcaaagttgcatttcccttgccgaatctatgggttaagataaggcagtgggaatggaagattccagcagccccacggagtatccactatgtcgttctgaattcaaagggtggagcacacggatgttttctgcaggtgacgcaaggtctgtcaaggtggcaggagggaagcagggacaggattttggttcagaggtcagacagcttctgaccaggacgttcagaagggttgggtttcacaaatctgctcctgaaaatcagttccctccatattatcctttttctaaaaatcttggctgtttccttgatggagtctgtggtaatcgttacgcctgcatttaggtgatgctgatttggctagtgactgcctctctcactagctagacaggagcctccatagtctgaaatgcgtgcgaagcctgagcgtgtccttagcacagagcagagcacatggtatggagtagtggaaatagatgatgttccttacggagtgaaaggaaaaagtgataggcagagcctttctcccctccttaactcctgtccaccttcctccctcccgtccacctctctcttctgcctctagctgattggctccccctcttagtttgctttcctggacttgctctcctggtccctatcttgcattctgactaaaccactggactcttttgctctacccacctttttctgtcgtagtgactcaatcacggtagaaatgtttattttccagaaacgcctgtggcttggggcattttcttctcttttcaaaaagagattcatatttcgagtatctgatgggacttcatcactgttgcacaacagctatgtaattgctttaggtgctcttcctgccgtgcagtgggtcaagtgtcacagacaataatttcatccatgtgctggaccccttgttctcaagtgtacgctgctaaatggcatgatttaaaattcctatacagtgtttattgccctgtcgcattttgaaagccagccagaaacatcaaaccgacatttaggttccccgcccactccgccacccccagctcttgggaattcatttcttcatcaaagagccacccaggacatcaaaacaaagcttactttctcaggccttaattcatctttaaaaagtcatactactgttttcttcagcatcctatggatttatgggttttttgtcattatctttatttcttattttgcagattcaaatatgacagttgctatcttcatcaaagtaacatgaaaggatatcttaatcattgttaaagttgatttttgtccaaatataaaaatcaaattaagtgtcttatagcttacaatatttatcagcttttgatttttggacatctctatttgttctatgtgatcaacgctgattttttaaaaatcatgcaactggattaatttttgatcttgaagccccctggattatgtaaatacatattatggtttaacagagagggatgaatgggattgagaagatatatgtcaagatatgaagaaggaaagaggctactacacagagagttagaatgacagggattaatgaatcttgcctgtatccctagttattttttttactgagaagacagtgagtaagatttaagagtgagcaagcagtcctatttatagaaagctgtttttaagtgcagccgcaaagacagtgaaagaaagaattgaaaatgcaagagatcacctccatactaaatgctagcttcccctaacgtcccagctctgtacagcattttgtaggagaaaaaaacaaaaaaaaaagcataccaacccttgcagaaatattatgaaatctctttggactctctgcagaatattctagaagtgctctcagtctttaagtctatgttaggcttgggaagctggggatgagaaggcaatatatatattatctggaaacagcttgagtaggtctgaacaaaagactggaggtgaagggaggacattgaacttgcagcactgctacaaatatttattctgcaataagccttgcctttcttaaagatgtttcacggcagaatagtaggagggtgaaatctgcatacatctcagtaataaagcaattactgagagaagagttcaaatttaggatcctgtgattatcacaagtccctccatgttaacctgttctcaaactctggggttttaaattgcaatatatgaagtccttatttgtcagtctgtgtcgggcagacaatatcaccccaggctttgtgattgacacaaatgttattggacaagggaaaaagaatgccacatgctcttataaatgaaatagtctttataagattccatatataagtgagatcatggattttgtatgtgtgtgtctggcatatatcacttagctaatgtcccccaggttccttaagtatatacaatttagcataaaaaaagaaatgaaatagttttcctttctaggcctgtatttgttacttatagcattctggttttcctggttccaagtgggctttgggttttattaatagtagaatcgttgaatttttatgcaaatactgctgatttacaggttggaaatctggacaaaatcagacctgccctagaagatgatgctgtggaaagtgtttgccttttgtcttataaagaaccatctataaaatggatcattttgtcgctagtctctccagactatgaaattggcattttgataaggtgatggaaagaaatttgaactatttaattactgattttgattcatacaagccttgactcttttagtattaaaatgaagaaacaggaaacagttttaagtctggttttacataaaatttacacttttttcacactgaaaataaaacagtaaaagccagcttatagttctttctaaatatcccaactttctcattattggatgcttctgcaaaacagcagtatggtgataccactcccagtgttgaccttgatgacctgagggtcccaaagtggcttcagcattatcatggagtcaccacaatgatcaggtagaagctggtgttaggaccagcgtgaatgggtcacaggggctgaggggggctgttgggaggtagcccatgccgtatactgaagagccatccatgccacttcaggtgggtgattgcagtggactctcttaccattgattaatcttcctaatattgagtaaagcattgattcttctcataagcatgaactgctggatgatgggaacatttctgtgattgtatcataagagaaagacaagtagaaagataattagaactgctgcaattctatgtatattttaatttaatttatttttttaaatacaaaagacagctatatttcctatataataaggaaacttattactttaaggaaatatactttctcacgagagaaactcaagattcaattcttttcacagttagccccgctgtggtgtgatttgatcttgggttccatagagatacagaaaatccaagtcccagtctgcttaattgccatgtttattttttaatctcggctgtagagcatttttaataactgatatgtagcttgcagggtagaaataacaatgctttggaatattacctgtgagactttaggaatgagctgaagacacccaacaatgacaacaatggcctctaccagcaaaacgggaaccatgactactttatcactcctgccggatctagttcttgtcagttcctgcaaaggctagtcacttgtctatttcgttggctagtgaaaaggaaatgcacaagaaatgtggaatgctgtctaacagacagaatcctcctttcacaagttgtttaagttggcagcccaagttagcaacctctatccgggtccttaacgtgacagcagaatgtgggtaggatggttaattaccagatgtgtctgttatgactcacccaaatcaatagctattaaatccttggtggctactgttttagaataggcttcattgaatatttgtatagaaatctgggtagaaaaatgtggacctcgaggtgatctaggtatttgttttgggcaaggaactctcatcagtggttggtttatttgtgtcttgggggatctcacatcatcagcctttattaatcacaggcacgaggggccccacactctcccccatacctctaccgccccattgctgaggatgggagagtaagaatatagaatatgctgtaggcttctgtgggattagatgcttggaggcagcggaggcaaatgttcatgggaacactgaatatggaggaagaggctgtgccagccccatagccacacatcccctccacccttacatcaggataagaggtagaccacagtctgttgacacttcaagctgaacattagttagtatccttctatgtgggccttcccaggtaaggatcgaggacactggttctcaacaccccggtgttctgggtcagggagaacagagaaaggagatatggaagtttcctgaaatgcatttcctctcattagcctcctgttggaaattctgatgccagcgttgtggggaatgggctgtagtttggaaagctccccaggtgtttctaatcccatgtgactttgtcttgtttttcccaccaccactggggtctcccaagttatggtttccatgtttgttatgtcgtcttccagctctgataccagagagtctgattctgtagccttggtgtatgcacgacctgtgaatttgcattattaacgcatgcctttgcctgttctgatccacatgaaccataattcacctttgcaaaacacacacttgcaaagaagctacccaaacagtagctaggaagttgatccagtaaagttccaagtacatctcgatgaactgttggagaactctgtattgggtagtaatttattgggaatgtctgtatacagggttaggtcttcactgaccaccataagaatttgggcatctttcgggataattggtgctggggtttagtaacaagaaagattctgagtagaggggtatgtagatcctgccagaggcactcccaatgtggatgctagcagcttacgaatcatctgtgtgtattaatatctatctctttgcaccattttttcttcctgttagcgtatttgatattcaggtttataaatgcttgtgctttgcttatggtcttgattccattgtatttctcacattggtcccttcttcgatagcagctggagtcccagcagagaagccctttgaaacctgcctgtaaccatgaagctccaggcaagagatccatagtgggaaaccatttgggtaactctactgaacaagcttaagagatgagctagaacgggctgagacagggcaggagagtggatctgtttgcagctagaggttttgctttgatgccgccttgggatgctgcacattcctttgtccagggcacaagctcattccagagccagatctgaagggctttgggtcatttgctctgttggatgttcttggctttcttttaggtaaataatcacaagttgactgtatttaccatacaaagtatatgtcattatcctaagttgtcagaaaaaagagagaagctggcatataagggcatatgtgcattttaaaccttgttacatatatgacaaaatagagggcagttattggtggcagattaattttttcaaaacatcgtgtccttgattttggcactaaaatagactcaaatgtgtgctggagagaggcctaaattcagaaccttaaaaatacctttttgtgtcctgagatcttattttagataatattaaaaataactttccctcctaggcatcttaaacaagtttgatgttataatcctttggtgattttattgtgattcactatagaaattacctttttgagtggccgttttgaaatttagctttagaaggaaatggtataaaagccattgtaggctgaataaatgtgaattctgcttactcatcactacaggaattagggtagactgtctctttacaataatagtttcctatactcatgttcctttaaaagggggtgggggcattatattaagaagtcacaagctctgacaggggaattgcagaagaagatttcagtttaaaatagctcacagttcctctctgatttggagttttcacaacctacatggtatagcacagactgttctcttttaaattttgtagtagagtaggtcaatcttttcccatctttctgccacggaaagggcataaatatttccatcatcagatttaataacctgtgttagactcatgagtaattgtaaatggtgaaacactttcttcataaaaaaaataaaaatgagagataatgtgactcagtattattattagaacaaatcaccttaacccatagaaaatatttctttcctgcagcaataagtgttgagtatttttccctggggtctctagcatctcttgataagagtgaatattgttaggtccagcctgactggtggccaaggcaggttaagtttatgcaatgagtcgattgtggtggagatacatttgcaagaaatggaggagcagtcggcatttcacctctctccatcttgttcacctttctctctccctctttagaaactgggagcaaatattagagcttacatgtgctcagtgagagtggagggagaaagctgtattttcctggggggtctggaggccttctctgggtttattcattttcaaagtcactggtggtttgctctctcctgggtaggtggaagacattgctgtgacctcttgcctgctcagggcacactgaagtctagaagcaagggttggagttctctgagcctgtgagtgtccctattcaaaggtgctcctggaagtgtctccctaaaggtctttgatggaggaggctggtatttaattatttttttctgaagtgcacaggcataggcattatgggttattgtaaagctctaaatagagccatgagaaataaggtaaatccatggaactgggcaactattattattattattattattattattattattattattattttattattattattattttggagacagagtctcactctgtcgcccaggctggagtgcagtggcgtgatctctgctcactgcaagctcagcctcccgggttcatgccgttctcctgcctcagcctggcgagtagctgggactacaggcacccgccaccatgcccggctaatttttgtatttttagtagagacggggtttcaccatgttagccaggatggtcttgatctcctgacctcgtgatccgcccgcctcggcctcccaaactgggcaactattattttaggctcattattttttggcaaatggaaataaaaagactcctcccctatttttatgacttggttacttttaaaagaagtatgcaccggacaagctgtgttcttcagtggttcttaacggagggcaattttgcacccacagaggacagtgagcaatgtctggagacatttttggttgtcacacatctggttgggggttgctactggcatctggaggggacactcactataagatgctcaacaccctgtaatgcacaggacagctccccacgacaaagaatgatccagttcaacatcttcattgtgccaaggttgagaacacagacttaaatagctcagagtctagttaccgtaacatcagtactgcgttttttccatggattttagagtggtcctggagagagaggaggaaggaaaatgtcatgaatctcagttgcaattcctttggctgctaaaaccatagctggtgatgcttgtcattgattaactttatttgctattttctttcttttcttatgaagaaagggaagccaaatctgtgttccctcttttgtcattaagaacatggatgctcagggtgttcctgggttcctccagccatttctccctcaagcaattatgctaattagtgtttgatcagatgattaaattataatgtgattaatcctgtgtgctaaccgctctgaatgcattttctctcgcctggttgccctgtgcctgaagcacccttttctgcggctggcggaggcctgtttttcctgtggatgtggatttctgttttcaaagcactgcaaattctctttgttgcctggtaaaagggagaggggatatttttgtaacctgttctctcaggcaaaggctggactggagagacctctgggaaatattgaaaccgtagctagaaagcactaatgatttgaagatactagatgtggagaaacgcttgaagaggagagtgcagagacagctgtagtggctccaaagtccatgaaatctttttctctgagagacttttcgctgtttgccttcctttcccttctgagtgttgcctaagtctctgcctcttgtgtatgtgatggccccgggaggggtgttctcggtttattttaggtttatatttccttaaaaaggcacgacatcatctggttttgttttctgataacacagtttaggtttgctcttgcatgccgtgtactttagactgggtgattttttgaggtgaggttcgttaacttaaaatgttgatgaaatgcttcctaatgtaagaaaattgggactgcataggaaagaatgtgagtagaaaatatcgatggtggtgttgtcattgatgggcttcttctctaaggctgcagattaccatggctcattgtgtagtttgatgagcttagcagtgattgaatttttccttgcaccctatcactttttctccctttatattagcttaatggggtagtctggatacaagaaataagagcatgtagaatatgtgcagttttttaaatcagaatttgcctgtgttttgatctggctggaaacgatagcctcttgcgttcaagagcaggtcacacgatgataccatatattaccattccagcttcccgcatcctaagaacccctgggccacaagaattactcatagagagagtaattatctgcatagattgtcacataccccttcgaatattgtgtaatctccttcatagaaatgaaaatctcttggtttgctttgaagaaagatatcctccttgtaattatttccctaaaaaagaatgagggtaaaaggaaactcgtatgtattgggcatctaaagtgtgtggacacttgagtgaccatttgattcgcactcgttatgtttattagctacaatagtaatgatcataaaaacaatagcttgaatttatgatttattactagatgtgaatattgttattatgaccatcgtaaagaaggcatggttagacaatgtgctcatggtcacacaattgttgaatgacagactgaggactacgcctctgttcattctcagtcaaatgggtatttttaatttcagttttacagattgcaaaaccagggtttggaaatgttgactatcaggccctggtcaggtggcaactgtgatttgagaatagcactttgagcccaggttgtctggtgtcacagtctttaaatcttctcccaaatcaagccacattcattcatttgaagttttcaagctgaaaatgattatgttaaattttctttaaagagttgttttgggaaagtgaaagatcggtttttaaaaatcggtgtataaatggaaaattcatttacttttccatgtcagccatttcgcttacttaagttagataagtaagagacaggttaattaactcttacccacttcagaggtgcaactatttcatgagattgcattctgttgggaagagtaaaattggagaccagatgacagttatattacattcatattacaggatagaatctttccccaactctcaaatttaaatcatgcatctgtttttaagtacactctatttcatttgtcctgaactgactaccaattttctcaatgccaaaatatcagaatcaaaatatttttgaaattgctaattggaggctgaaattgtgagttttgtatcagtttgagcttttctgaaaaaacacccaaattagttttgttagtaagcgtctgaatcttattgaagctgaatcattttaccggaagtgtccatgggacatgcgtcttaaagagtttagaaaatactgcctagacatttcagcctgactgaaagctcttgtaataaataagaataagctatgcctgtgtgtgcctgtgtgtgtgtgcatacctgtgccacgctatggtgatattcttattactctctcacactgagttaaggttcaagccagctactcatatgtgatatatgtcttctgagaaaggacatttgccttctgtggagtgtgtccattgtccaaatgtgatgaaaatagaccagttctctcagagctcagagcttccctcggctgctggctgcaaggtggtggaactcggtttattgcctggttggcccctctgcaggatacacactgcgtggtgctggttggaatactgttctaatgaagtcaccatctgggtccactggttggtcccctgtcgtgacaattgccttcatcctgtccaatcagccacctcacaaaccttggccagggatcccatggagagtctgactacagagaaatttaaagatatttgtcttcttgtctgtggcctaagcagcctgaatttcatactatggtaatactgacagaatcacctgtttatggagtggtgaatgaacctgtttatagtaattgctaatattcattgagctcttattgtgtgccagaaactgtgctaagtgcttttttctaccatcccatttaattgacaaacaagtctttgaggtgcctgttggtattatttccactttacacttgcggaaattcaagacttacaaaggtgaatgcctttcctagagaaggcatacattgagccggggtggaagcaggatttgaacccgggcagtctaattccagaactcctgcacttgacttccaggctgtcttcctggatgaatgagccccagataggtcagctggtttctgagtgcacatactatttagagtggtgatatagcttggatatttttccctgcccaaatctcatgtccagttgtaattcccagtgctggaggtggggcctggtgggagacgtttggatcacggcttggcgccatccattaggagggatccttcatggcgtggcgctgtgcttcatgatagggagttctcttaagatctggtcatctaaaagtgtgtggcacctcccccacctactccctgtctctcttgttcctgctttcaccctatgacctgcctactcccctctcaccttccttcatgagtgtaagcttcttgaggctttcttagaagctgagtagatgccagcaccaggcttcctgtaaagcctgcagaactgtgagccaatgaaaccgcctttctttataaattacccagtctctggtatttctttatagcaatgcaagaatgacctaacacaaatggccatgcttatctggaaaactggaaatgtaagttatggggagagttaagaggagccagatagcaaacatggctttcttaagcttttctgaaggaagatgtgggaaaaaatgtggcaatatgagaacaatttgggagtctcagggttggtttgttttcatcccagcatttctggaatctcagctcattcctgagatgagaggctcagtcacgaaaacattgccaagcacttgtggcctctcccatgcaactaagcacctggtcatccccacttcccaacgtgcagcatgtgtcacccatcttttcatatccatttctatggtatttggattaaaaattaaaccctccaaatttcagcagacaacactaggtgaccaccacctgtctgtagtgatctcgataccatcacggatctatctcttgacagctgactccaacgccaacttgcttttcctctgacctgtttcaccaggtgctcacacctactcacccatgtctcagagactatagactttgtgatatacctgattatacagccccagcctatctgccattgcatcagagcagctgcacttgaccaaggagctctcgctgcacacactgtgctctgactggtctcattatgcatgaccacaaacctcgagtgggctcttagctctgccctcaatctacctcactgccctagttgatttctgtgtctgtgggaagactacttcacacctttctcacctccccaaacctcaaactccccttcctttcccagactctgagtcgataacctcatatgatttactgagaaaaccgaagaatcaagtgaatacttggactattccctgctctccaatacacacccacacactcaatttttcatgtgatcagcgtccactcctgtttttattgcctccctttcaccccactgatgatgggggattcagttataggggtggttgaacacatgaccctgggcagataaaattgacagcagtgttgcattcaagtattcccacagcccaggggagtaggacagggcaggccatacagagtgaactagcaggggctgcgggaagcagaccttgtagtaacaagaagggatggtggccgtgtgtgcacacctgtaatcccagcacttcaggaggccgaggcgggtggatcacctgaggtcaggagtttgagaccagcctggccaacatggtgaaaccccatctatactaaaaaactacaaaaattagctaggtgtggtggcatgtgcctgtagtcccagctacttgggaggctgaggctggagaatcacttgagctcagaaggcggaggttgcagtgagctgagattgtgccactgcaccccagcctgggtgacagagtgagactgtctcaaaaaaaaaaaaaaaaagagggtggggtgtcccctggttcctgagggaggatgtgattggcttatttggctgattccacaggctgacgggagaccgaagcccactactcatgggtaagcaggcactgtgcctggtccctatgagcggagtgccatttggctaggggactttatccatgacagctcatgggtgggggagaactagcaggtaagccctttgaggctcttctgaatttatcccgttcacagcaacacaatatggaaccttaatctcaggtcccacaccagacccatacacatgaccttcgctactgtgaccatggaagccctggccttgctcctgttgaaagctgaaacctccattcatgtccagaattccacatctcccatctgcttaaagactttgcccttgtatttatttttatttatttatttttatagaaacagggtctcactatgttgcctgggctggtcttgaactcctgggctcaaacagtccccccgcctcagcctcccaaagtgctgcaaatacaggtgtgagccactgcatcagtcctgcccttgcattttatctcagcctcaacttccccctcttccagctcagcatatcaacattctgttttctctctgttatccctaccactgtaaaacgtactaacaaccaccacctcccatcttgtcaccacttccttcttccatccaattcctctgatactttttaatagtaaaactactggaaagaattgagtatactagtgcttctcaaactaactgtgctgaaagatcagtttttcattttccaatctgttgcagcttgatgtgaggtccttacagtacttgcctcaaacacagcttgttgctcatgcttcttatcacatgagttgaacgatacacaaagttgcctgtaccgcccttcctgagaatggagcccactgatcacccccttgaatgttgcagcaacttctcagtttctgtgcttgtctcactgtagacaagaaacaagcagctggtctgtacacacttcgattagcgctgtttcaactcacctgacactctcatctttcagtctctgttgaacacacactgatcaggtcttcttcaccactccattgaatctgcttttgtcaatgaggctgatgacttccacatttctagtcttctttttctgtttattttctttctttcttttcttttttttttttttttttgagacatggactgactctgtggcctaggctggcatgcagtggcacaatcacagttcaccatggcctcaaactcctgggctcgagtgatcctcccacctcagcctcctgagtagctggactacaggtgctgcaccaccacgtccagctaatttttaatttttttgcagagatgggggtctctttatgtgctaagattgcaggcatgagccaccacacatgggccacgtttctagatttcctcatgttcactctctcagcagctgtgacacaacagatcacacttcccttcctgaaacaccttcacctggaccgtgcacacctcactctctgggtttccctctgcctcactggcttctccttctcagtgtctttggtgagcttcttccctctaattagactctaaatgttgcagcccactccagggattaattcttacccctctcttctcctctcctttcctctctgcttcctttcccttcccttcctctctctaattcctctctatataatttaatttaggtcaaggcattaaatgccctctctatgctgatgacttccatattcgtatctctatccatgatttcttctctgagctcaaatccagatcctgaaatccagctgcctactcaacatccctttacaaaactcacaggtatctcaacatttaaactctctgaaggaggccttctggattttcctccctgtaaccacttctatctcacattttggtcattcaaactgagcatcgctcgtccctcactgcacagaacagaaatctcagagtcgtccttgattcctctctgtccttcacatcttgtattcaaaccaccagcatgtcctagtgatgctactttaagaatctgaccatttcttctacctttaaattccttcaagctgcgttctcctttttgcctggactatcatgataatctgccaactcacagctgaatttccacccagtagccaagggatttcctcaaaatataaagcagattacatcactcctctttccaaagcctctcccttcatccccaaaataaacacagcattgcctacacctcaaaccccttccatggcctggcttgggctggcccaccccaccccctccacagagccatgctggccacctggatgtttctacagcttgctgagctggtcctctcctcagcactgcactggccgcgtgttctgcctggaatgctctaccctggccttttcccgccccacttcttcacttctttcagttctctgtccaaatatcaccacctaagagaggtctccctgaccacctgatctaaaacaaagtggcctccttgattgttcagtttctccttgccatgcttcaggtttctttgtggaagtcagagtacttaaaatcatatacttagaagtttatcatctgtctctcccaactggggaagcccacatttgtctactgtgctcacctagaagagtgactaacaggctgcaggtgcccagtaagtagttactgattgaataattaaaccaatgaatgttgtttaaagcaatgtatagctcttagggactggatgtcattgctgtctcttcagttctactttatttatttatatttctgatggaatgacagtatatctctgtgtgacaatagtttctgcatttggaagatctgcacttgtattttaattaaaagatcaacaagcattatgccctagaattctcaactctcacgcacccataaaagatataacaataaaaccccttacttaaaaaaaaaatctttgttgactacccatgtaatttctgatatgttgtatatactttgaggaatacaaagatatttggttcaaaaatttttgaaaatgtttactgaggccaggcacggtggctcatgcctgtaacccagcattttgggaggctgaggtgggcagattgcctaaggtggggagttcaagaccagcctggccagcatggtgaaaccccgtctctactaaaaatacaaaaattagccgggcgtggtggtaagtgcctgtaattccagctactcgggaagctgaggcaggagaatcacttgaacccgggaggcagaggttgcagtgagctgagatcgtgccattgcactccagcctgggcaacagagcgagactccatctcagaaagaaaggaagaaaaaaaggaaggaaggaaggaaggaaggaaggaaggaaggaaggaaggaaggaaagaaagaaaatgttcactgaacacctatatgcactaaactgtaacatccaagaaagcagggattttgtgttgcccattgtagtatcttcagttcttagaacaaggactgacacgtaagttgctccctccatatttgttgaataaataaatgagaaaaaaacactatattaacgactgtgcaagaaacaaaacaacttcctcttttctgggtcatggcaaagtctccaggacaataggacatgctcacagcttctaaaagggtgtacccaataatgaccaccatgtcggacatacagagaaagctctgcagtgtttatggaagcagaaaacaacttctgattagcctatttaaaaagggcttcaaagagagggggatttaaaaactttacttttaaggttgtgtatgcttttgactgggaaacgtgggcagtgaaaagattggcaggagaaaagaggaaaatgagggaagtccccgggtgtggagggagagacacagaattctatcaagctgctgtgcaaagtcatggtggaagacacatctaaaaatgggataggggccgggcgaggtggtgcctgtaatcccagcactttgacggggccaaggcaggaagattgcttgagcccaggagtttgaaaccagcctggaaaacgtggtgagacccaatctctacaaaaatattttttaaaaagtaagctggggatggtggcctgcgcttgtggtcccagctactgaggaggctgaggtgggagaattgcttgagcctggaaggttgaggttgcagaaaaccatgtttgtgccactgcactccagcctgggtgacagaagtgaggccagcttctgtctccaaaaaaaaaaaaaaaaatcaataataaaaatgggatagggagcagattgtggaaagatttgaattcaaatttagatggaattgaattgaagattcgtgtgttaaaatgctcatctctatttgagcaatcaatgcagtattttggttgccgcacataagagacattggagagcagagagaattggtggaagggtggccaagcaaaggctaattccacggtgccggggtgagatgatctgccactaggacagtgatggcggctgggtactgacctaggtgggaggctgggggacagagggagcccaatggggatgatccaagcatgactgctgataaggttgggtctagattatccccatggcggtgtctcacaatgtgagtttaccgttaaactaaagctgtggatagattttatagccttgtgtgtttaattactgccaatattgcctactttttttttttcttttgagactctgtgaaatttgcgtttctgcaaactatgtgccagaatggagtcattgacagggattttataacacctgatgagaattattctataattttatcacagcataacccaagagatgctgaaacctgactgcattgcaatatgtatggatcagagggcacatcctgaagggctaatcagcttcaatcaactcataactgacaagtttaatttcttctgttttttgtatttctcttgaaattaaagtatacaaaaatgtagtattgacagtgaatttgggtgaggtttcactgtagcaatcaccatctattattttacaaatcattgggatcaattttggttcctgttagcataaagctatttgggtttttagtaaccagaaaatgaagggttaagcacacctataaatatttatattttttgttatgtagtataacttggtatcacccaaatatccattttccctcattcatatcctgaaaaattttaagtttaaaaatgtgttccacgttgtgagttttgaaagccttaaacaagttgaattgagatttacaggattcaacttagtgtaactttgacctcaaaataatttacaattcatttcatatttcacatctgcagcctcactttttcgttgagcagcttaatggtttttttttatggtttatctgtttttggcctccttgtctgtcttcctttctctcctcatcttgcacacttattgacacacacacacacacacacacacaatgtatgtatgctaagattaagcattctttcttttttgggggggcggtgctggggggctggtgtctcgctttgtcaccctggctggagtgcagtggcacaatttcggctcacggcaacttctgcctcccgggttcaagcaattctcctgtctcagcctcccaagccgctggaattacaagcatgaaccaccaagcccggctaatttttgtatttttagtagagacggggtttcgccatgtgggtcaagctggtctccaactcttgacctcaagtgatccgcccgcctcggcctcccaaagtgctgagattgcaggcatgagccactgagccaggccgaagtgttatttcttataagaagtttatgtgtaaattctttgcttttgtacttattgaaaaagttatagttttgtacttattgaaaaactgaaaataaagagaagtagggtttacatattgtatatacccatctcaacgtgatacagattgtgaggaactggcactatctaagcagggtgatcatgatacagaatgttactaatgttattaatgaccgaagatgaaaccagtgtaaactcaccaatgggctttcttagaaggagagcattcattaacctgaaaatatttactgtgcttattttatgtccattgggaatatggaataagataagcacagtataaatatggtttcttagttggccatttcattaggaaattatgacatagataagtacaaagtaacaaagtctttttttttaaaaaaaaacagaggtaatataagctaataaaacaaggagacaaactgaataatccaatttagttagattataaaatgagctcctgatcattctaaaaagacttttttttttttttttttttttttttttgagaaaagatctcactctgtcacccaggctggagtgcagtggtgcaatcttggctcgctgcaacccctgcttcccgggttcaagtgattctcccacctcagcctcccgagtagctgggactacaggcatgttctaccatgcccagctaatttttgtacttttagtagagacggggtttcaccatgttggccaggctggtctcaaactcccgacctcaagtgatctgcctgcctcagcctcccaaagtgctgggattacaggcatgagccactgtgcccggtctttttttttttttttaacttttattttaagttcggggatacatgcgcagatttgttacatggataaacttgtgtcatggaggtttgttgtacagattatttcatcatccaggtattaagcctagtacacgttagttatttttcctgatcctctccctcctcccactttccacccttcaataggccccagtgtgtgttgttcctctctatgtgcccatgtgttctcatcatttagctcccatttataagtgatgacacgtagtaggtatttggttttctgttcctgcactagtttgctaaggataatggcctccagctccaaagacatggaaccaacctaaatgcccaccaataatagacaagataaagaaaaatgtggtatatatataccacggaatactatgcagccataaaaaggaacaagatcatatccttttcagggacatggatgcagctaaaaatgttaaatataaacatagaggagaaaggaagctttgtgaactgtacttcgggagggctttatggaagtgaagctgttgccacagaatcctagggaacatggatcagtgctgtcctgcagtttgagaagagggctaggcattgaaagcactgctgtggggtgtgtgtgtgtgtgtgtgtgtgtgcgcgcgtgtgtctgtgtgtgtgcatgcatgcacataaatctagagactgaatggatctgaaggaggctgaagagcaaaatccaggctgcagtgagaagcttttaaggactctcagagcaaagctgtgtgcaacagagctaaaagataaaatgaaaaatgtactgactcttaagttgtgaaaagtcaaaaaagacaatttgacaaactcaaaacagtgaagatgattcaagaaattagagtgtgtatatatatatatgtgaagatatatatatctatatatatgtgaagatatatatatctctctatatatgtgaagatctatatgtgaagatatatatatctatatatatgtgaagatatatatatatctgcgaagccctccccaactacagttcatacatatatatatatgtctggatatctggtttgggtacaaaaaacttgctgtactaaattattgataatatattttaaggcaatttactaagttaaaagcataataaattataatctattattgtgctctagagaagttattgcttaatgaggaaattaaggttaacattgaaacctgggaggttctgatgtttaagtgggcataaatcttgaatggagttaggctcagggccacactgggtgatttatccaaattcactcactcttgattttttgtttttttctttgaatttttacatggctatggagttcaaccataagataatttttttctgtaatacatatttatgaccctaatttaaaaaaattttattttactttcagttctgggatacctgtgcagaatgtgcaggtttgttacagaggtatacatgtgccatggtggtttgctgcacttatcaacctgtcatctaggttgtaagccccatatgcattaggtatttgtcctaatgctctcccccaccttgcccccactccctgacaggccctggtgtgtgacgttcccctccttgtgtccatgtgttctcattgttcaacttccacttacgagtgagaacatgcagtgtttggttttctgttcctgggttagtttgctgagagtgatggcttccagcttcatccatgtccctgcaaaggacatgatctcattcttttttatggctgcatagtattccatggtatatctgtgccacattttctttatctagtttatcattgatgggcatttgggttgtttccaagtctttgctattatatatagtgctgtaataaacatatgtgtgcatgtgtctttatagtagaatgatttataaccctctgggtatataccccgtaatgggattgctgggcatgaccccaattttttacctaagagctttttatagttctagctttttttagtcacaagcagggggcctttatttatatatccctacacacattatttttctccataaattgtcaacttcctgccttatcccattcctgatgatgatatcctgttcttgggaattaaggccctagagccctagaaccatcaacagttagacatggaaggacctttgttaattacctgtcaaaatcttctatttgaaagataagaggggagtgaggatcaaagatgtaaattgacttctttaatgaggcacaatatgagtggaatggagctggaacccaaaccaagctggcctatctcccagctctagacagtttccatcatggcaaacatattcatgagaagaatgttggaagaaattagaaattcgcatataagccaatgcagatcaatatatccatgctagattgcgtgatttatcacaacagcttggcccacaatgatctcgttggttgactgagatgggccttttttacactcaaaatttgtgaggattagtaattatatggcattagcattatgttcctaaatttatggctcagtgaatgctaagtatgcaattgggaacgtatacacaaccattatgtgtttggcccttgttgtttcctgagactcaacatcttatagggtgaaaatccaataatgtgttttgacgacatagactgcccccactgtctggggaaggttcacatggggctgaaaagctcccctgcctgggtgcagcccagcacagtgctgtggtttgaggcaatctgtgttcaattacggtaaaatgttaaattagctgaaagagaatttttctggtcacttgagtctgccttttggactccattaatcattcaatcattaaatcatttatattaaccctttctaaccagtcctaaaataatcagctttgtgttccgtgtttttcctcagttagattttcttgggcaaatagccctgggccccagtgaagaatccagcctaccttaggtgctcagtcagtgttgagcaaatgggtggatggctgttacgcaaatgggctccgtgtagggcttattagacctcaaatcctggtttcctgtcatacttcaacaggaaatgctacatttgtacttcagatctaaattttattttaaagccagaaaaagctctttttatataaaataattatgtggttattttaaagtaacaatgtctcattccaaagaccatctctttccttttttggttcagctgtgttttagacattatctaaatttagtcgttctcttagattttatcacatcttcaaaaaatgctattttagagtaaagaatatttttaattgttctgttcttaacctcagtgtccatggagggttggagaagaagcaacatatatgaagctgaagattgatttctaaaccttcagttaacgttggctttccaagagcaaatgctcaagcgtgggataactatcttatgtgactttgtctttttttttttttttttttttttttttttttttttttgtgagacggagtctggctgtgtagcccaggctggagtgcagtggtgcgatcttggctcactgcaagctccacctcccgggttcaggccattctcctgcctcagcctcctgggtagctgggactacaggcgcccgccaccacacccagctaattttttgtatttttagtacacatggggtttcaccatgttagccaggatggtctcattctcctgacctcgtgatccacccgcctcggcctcccaaagtgctgggattacaggcgtgagccactgcacccggccgactttgtcttttttttaaaaagaaaacaacacatcgcatgggggcggggtgcctccatccaggcagtgttgcagggacaggcggatgtccctttaccacatcgaggcccaaggagctttcatcaccgggagcttcttttttttttttttttttttttttttgagacggagtctcgctctgtcgcccaggccggactgcggactgcagtggcgcaatctcggctcactgcaagctccgcctcccgggttcacgccattctcctgcctcagcctcccgagtagctgggactacaggcgcccgccaccgcgcccggctaattttttgtatttttagtagagacggggtttcaccttgttagccaggatggtctcgatctcctgacctcatgatccacccgcctcggcctcccaaagtgctgggattacaggcgtgagccaccgcgcccggccaccgggagcttcttgaagtgatgaaccacgcagtgttatattccttttaccttctactctgtcatataaatgatgacaaattgcctagctgtaaatttgaaagtccctaaatggcatttttgtcaaagccttgagaacaaaatgcttactcggagagatttttaagtcttgggagacggggtggcggggagcaggcctaattattatgcatcatggcacaatgcattatgcatcacgcttgcttttctgctttttaaacacttgttatggatgatgaaactaatttaaatggacaaacagggcgctctcctgcacattactcctgtgatgtcatattcttcttccaggggatttcatcctgcttcccttggaagtcccccagacatgcacattttaataagacactttaataattagcttagagataattgtcagtcaagggaaaataaccttttatcataggtgccttgaaagtggcctgttccagagaagaaacaagcgatctgatttgcacttaagcttgcttccctttccctcctggcatttatgtggaataaaatactacaaacgggggagagtgtaaaaaaaggaaaagtgtgggtgtggaaggggaagccggagctgtcaaattgttaagacaaatggggcttagagaatcctaattaaacctgaaattgcttagaaacaggaagtatgtattcctaattgttggcaccaaaaaaaaaaaagaatctaatttactgcatatctttaaataagaataacccattatttggctgaatgagaattcaatccttacctattgaagaggtgaatggcgtgattttaaaggctatgaaattcacctccaaagttcatcatcagctttagagaatgtcaaaaaagagcgagctcgaagccatgtgtagaattttttttttctttttctcataggtgtattctagctttattttggggaaactttagtctattgagacctttagaaatattatttgggtctctaaaaaataaatatgggcatatagtctcaagactcaacagaaaatagattcattttgaagacaacccagcagcgttgcttaataagaaaaaaaatgtatccccttgggctaggacttcagttcctgggaggatgtgaaagatctctattgcagatcgcagcaccagtctttcctcctgttattgtatcttttgatgcagaggatcaaccacccctggtttttgttgttgtttttattgagacagagtctcgctcttgttgcccaggctggagtgcagtggtgcaatctcggctcgctggaagctctgcctcctgagttcaagcaattctgcctcagcctcccgagtaggtgggactacaggtgcatgccaccacacctggctaatttttgtatttttagtagagatggggtgtcaccatattggccaggctggtctcgaactcctgacctcgtgatcagcctgctttggcctcccaaggtcaccccctctttttatttgggggtaggaagggcatctagcatcccgacacctcaaattcatcatcacatggtgcaggacagaactaaggacaaattaggaccctttctgagcctttgctcaagcttcaaatcacacttcttctcgtttgtacagcacttatagcactttgactttcatttatttaaaaaacacattgaatatgttatccccactttttagaaactgattttgctgttttgacattgtttctctagtagacgggaagggataatagattggaagcaggaactgtggattctgcctgtggttgcctctctgactttgggatctcagggatgtcagccacattgcctcatctgtggtgacaaccacaatggtgacaggtggaatcatgatggctgcaaactactgagcactttctaaatgccaggcactgtgtaggatctttcatcatcacatctcagtctcactgtagtcctctctcccctttacagatgagcaaactgaatcacagaaaggttgagaacattgctgaaggtcactagaggtgtgtgttcagtttgaatgcagatcacctgacttcaggaacagtatgataacctaaatccctaaactcatatctcccatcctgtctacctcacaaaattatcgtaaacaacaaagcaaacggccataacttaggaaaaatactttgaaaacaaggaagcacaccctgggtgtgtgtgacacttccattattatcactttctcagcatttcatctggaaaacggacgtaatcacagttgccctagaagacagtggtgctcattacatggaagagatttgattagtggtggaaaattttgtcttttaatttgtccagcagagggttggtgccagctttatcctgggagacaaagggacctacatttgcttatatttgctgactaggttcttgtgtctgtgtgaggggcagcctgcctttaaggcattatctgtgtcagcccaggttgagggcttagggatggaggctgctggtggaaacaaatgagctttgtttagggggaaaatagccttatctcgtggcagtctgtcccttcctatttgttctgagaaaatgaccaagtgataggcccttcatcatgtacaaacactctttagattggggttaccttttttctttgggaactggaactaacaaaatggcaatgacctgaaggttgagaatgacttctcctctccattcagcccctaccctgtcagctgtcactgcctgcatcactgggctgcagcatttcagcatcttctttctgaagcagatcaaatcatgcttagaaaatttgatgtgtggcccttctcaagggcttttcttcacttgtttttattttgaacttgtaaattgctatcacattttcaaacactgcaatcacctcgctaattgctgtttttcatgaataagaatacaagatcaatggccttttcaatattttcctttaccgtgaggtaatcgaaggtcagtacataaagctcctgacatttcagttacctgctcttcctcctgttaactggattacctacttgcctcttgtggttggtcccagtgtttttatttctgcctctgcaattgtcagggtgtggttccaagtcaatcacatctgcaggtcaacgtctcatcttcgttttccattatatccttttcccgctcttcttcatgattaactaaaaccccttgacaacaatgatctatgtatttgtcaatgttgctgctaagcctttagcatcaccacggtagagacagacagctcccttcctcatcaatccttgtgtttatgtgagcatttaaaatagctattagatgtaacttagaaagaagcagtatttcttttgtcacagcacatcttttcaagagagattttgcacttctcactttggtcctttctctactacgctaaggtgtgggacttcacacagattgttcttacatttttaatgaacaacaatagtaagcaattaagaattttagcttgagattaaatattgaaaaatgtcactaaaagagttacaaaaagtgcaactggacctgtgcagagccagagagtctgcatggttctgcggttcttcatgcgcaggagaattacacagttggcacatcccagcccatgctggaggccacaaataaagctgttgtttagtatgctccagttgcattttggtcacatgtgcttatattaatgcctttgctttctgcttcctcttgggtattatgtggttgcttggctgcaacagtgaattccagctgcattgatgaccactggaaaactgcaagagaccaaaagattcagggaatcgagcctgcctcatacccctcataaagctggaaattaactccaaaagaaaccgtcaaaactggctgtgctcaggggctcatacctgtaatcccagcactttgagaggccgaggtgggtggatcactaggtcaggagttcaagaccagcctggccaaggtggtgaaaccctgtctctactaaaaatacaaaaattagccgggtgtggtggcgggaacctgtaatcccagctactcgggaggctgaggcagagaattgcttgaactggggaggcagaggttgcagtaagctgagattgcgccactgcactccagcctgggtgacagagcgagactccatctcaaccaaaaaaaaaaaaaaaacaagaaagaaagaaagaaatcctcaaaactatacaaatatatggaaatcaaataatctgctcttgaataatcattaggttaacaatgaaatcaagacggaaatttaaaaattctttgaactgaatgataatagtgacacaacttgccaaaaccactgagatacagcaaaagcagtgctaagagggaagttcacagcattaaatattaaatgctgacatcccaaagcctgaaagtgccaaatagacaatctaatgtcagacctcaaggaactagagaaacaagaacaaatcaaacccaaataatacccctgtcttcatataccacagttatttagattaatcaacatatgtgtggtctcataggttctcttgcccaaccatggtttttaggtcagagagatgtgggttcaaatccaatcaactcttccctagccttttatggaatgaaatggtgtttcatttgtgccgttatcaatcatcatctctattatactctttaggatatattaggctgcacttttatgcgcatgagctttttgtatttctcctcgtatttcaaagccagagttctctgaagacatgtcgaaacccatttacttatctccctgcctatactcactcaacacctggtgaatttccatctgccattcctttcactaaaacaatttaccccaagatcaccagtgacatacgtattgttgaatttagcaggcaattttcaatcctcacagcagtttccaacactggtgaccacaatctctttactgaaacaatctcttgctttggcttccaacttcccactttctccctccttcttttatttttctagtctctgtatcaactgggttgtgcgtgacctttaagtgaattccttaaagttcaaaccaaggctctcctctatctttattctacatcatcttctagaatgataaatgtgtgcccataactttctatttcctactgtactttgagcttcagacctatatgttcaattgtctggacatatccacttcgaactctcaaggtttcttctaaagctagtaatcctaaccaagttccatcttctccctctgtggcccacaaatagccataccgtgagagtgtgggtagtcatggttcacatgtatccaaaaagagagcacaggtaatggaagggaatttaggtgtcttgggagccatggtgtgatttcttgatgagagctgtggctcaggggtcactgtctgcgtgctgggcacagtgtgacagtagaatgcatggactcccaagctgaagatataagtgctgggttatctaggaagacttccttcagacactggtgtgatggtgctgtcattgacctgagtacctgctgcatggaaggggagaacatattcttgctaagactgggtatttgagatgtggcagtttatgaggtcagatggtaacgatttctggctctcagttgatttgctatatttttctgattcaattctgtttctctggttatatctgttatattcctgctctcccttacctgtttcctcacatctaaagaatacttcactcttcacttactcactggtattttccctgtaaacctctatgccttctcctgatctattgtttatctccttgtaagctaactcttctactctccaataccaggaagatgggagatgaagaagaaatattctctttttgctgaagcaaggatgcctcaattggagaacatagtgagagtgaatcacaacctaaaggcactaagaagtgagaaaggccggaacagacaccaaagttgacttccagtggtcccaggtgcctatcccatatgggaccccataggtcttcaacgcaatctactcagcctggctcagcccacagagaggttctgtgggagataaagatttctcaaaaaaccaaaatgagaaagaaaggctaggcctggaaagtgacccaaagctgagttaactgctctctcagcctccaggttacccatgaggatttctcctttctgtctgcatcagcctttgttctgtctttgcagactgcctttatctgcttctccagcatggaccacctggttctgctgctccagggcccccttcccaatttctggtggaaagaatctgactccacgtgcgcccattgatgggtgaacgttaaaactctttagaacacactttcttttccagaattcatgttgatgaacttgtaagaataattaaatcaattaaaattcaacaagcatcaagtatttggtaggttatcaggtacttgactgagtcaattcaggatttaatctcaacaggtaaaagcttaaaaaggaagcaatcatttgaattaatgtttgaaatgcagagccacaaatactaatttgggggttctggctaatatataacaccctcgaaaagtctgtttgtatttaaatatcacatggaggctctgtttcttgctccttgactctgcacgctgtagcatgaaagtgatgacattggactctctgtcttctctggcagaagcccactggaaaggatgtgagaaaccctgactagggacacactgagccttcccatattatttaatgacagtctgtgccagggcctccattaatttaactgaatgaaatattcctatctggggtttcaatagcccttcactgagtatctcctatacaatgtccccatcatggtgtagcctctcattgcaaacatacaatgaccccaagtgaaaaaattatttttataactatagcattttttttagagacagggtcttgctctgttccccaggctggagtacagtggcactatcatggttcattgcagccttgaactccaaggctcaagcaatcctccatcctcagcctcctgagtagctgggagtacagtcacacaccaccatgtctggatagttttttaatttttattttgtagagatagggtcttgctatgtttcccagactggtcttgagctctcaggctcaagcaatcttcctgccttagcctcttgggtagctgggactacaggcatgtgccaccacatccagctacaaaaattttcattattacctcagctggacaagcgagaaaactgaaatccagggaggttggagctgggtcagctaattagtgatggggccaggatccaaacccagatctctctgactcaaaagcttaaacactctacccaaccttcttgtgttcctggtttaccagactacccaccaggaacagactcgggacctactgggttaaggagaacttctaataaattcatctctttttacatgacttctctcccccttttcagcaaatttctggagtagaaacaatttacattcttctaagataattttcttccccctgaagattaccacacactccttcctgtgcacagacctgagggtgcaacgttctagctcctcaggaacttctgagagggtgaatcgcagatttggatcagggtgaaggctatgtttgatcaatgttgttccacaaggagatgcacagtaacatttagactacaaggaaaagcagctccagccctcttctttgtctgcaagttcagccacatgggctgtaatctcatagtttcaacagaggggcctgctgcctctggccttactgggcagcaggtggtggggacggctgttccttctggagcgacactgccatctcgcctgaagtcaggaggcaatggtgcaatgcactgctaatatttttctcctgaagactgatgacttgctggatctgtagctaaatgtcttgtctcattttcacagccacgtcatcgcccttttcctagtgcttgtgagtgagtcacgtgcaagggccatctgggaggaagcgttctgttaaacctttctttaaagcatctttttgatgtcctgggaaatgcacctgcccactagagttcaattcagcaaataattgttaaatgatcaccataggcaggggacttgctatgaatataacaaagatgaaaatgccagttgacagaagcatgacgtctcctagaggacccagatccaagtgaagcaagtgcagtccaaggcagggcagggtctaggctgacagtttacaaggctcagtttcttagccacttacctacttctgaaatgcattcttatatgtttaacatctttattgagcgataatttacataacgtaggattcacttattttaactgtatgattctctgattcttaacaagttcacagagttgtacaacaatcgcccttttagaactacccccaaaatatctctcatgcctatttgaagtcacttcccatccctgctttgaagtcccacccccagtcaacagcttctgtctactttctttatagatcggcttttcctcaaattaggatctgcttctggagaactcacaccaagacacggccccttgtccagtcttatgagctaccagtctgtcctgggacatggtggcagctgttgtctcttgcctttatcgtggtggtggctgtgctgacctggggaaccctggaacttctgctatcaatcccaacaggccagagctaggtggatgctctggtctcatctcattggatgagacccctgtcctgccctaacagtcaggacaagggtctaatccaatgaagaggggcatcaaagattgttcaagaacaatcagattgaccatgggaatgggtcagtggtgagcatgtaggatagtctctggggtagaagttagatgctaggcgcaggttaaggagcctggagctgatggtccaggagggttatgtcacctaacaaagcagagagtgtcagctcatctgcaaatggcgtttgcctttggggtaattccagcccacactgaatagcaggtccatgtgtaatctccaaagtcttcttcaactttatgagaatgggcctgggcatggtggcacatgcctgtaatcacagcactttaggagggcaaggtgggaggattgtttgaacccagagtttgagacctgcctgagcagcatggtgaaatcctgtctctacaaaaagtgaaaaaaattaggtaggtatggtggtggtgcacctgtagtctcagcaactggggaggctgaagcaagaggaacacttgagcccaggagattgaggctgcagtgtgctgtgatcatgccactgcactgcagcctgggtcacagagagagactatgtctcaaaaaaaaaaaaaaaaatgatggttgtattaacccaaggcctacttagaatctcaaagacctttctctctctcctcatctcctgccagagcttgaccactctgtggttctagctgcacttttatcacttctctgttctacttgcaagatggcttcttttcatttttttgtgaactttgggtctgtatgttgtcagcaatcttcagtgggcatttttgggcctcttggtcttcttgtggtctggtgagtagagatgttgactgatacaaggacagtggaattcccccattgcttcaataattttaatagctgaccctttgaggaacattgaagctggatggtcattcagacttgtcccaaattgagttgggctccagcaacacccattgaccagtcattggatgagtgatgtctttggggaggaggcgtctttggttgaggtcatagaaggactcagctctgaattctttgcaaacaacacactcagcagatgaggagatgtgtacttaggcccagaagtaggaatctggacagcagaccacagtttctactatagacaacaaaagccacacagtgaacatggagctaaaagtcactgtggttcatgaactataatatacctcacaatagcatgctataatatgtaaaaatacccctcggacagataagagaagaaggtggatagaaattcaggcttttggcccttttcaccacttcccaaccctcttccctttttctctcttctcttgtctcctgccagagcttgaccactctctggttctaactgcacttttattacttctctgtcccacttgaaagatggcttctttttattttgttatgacctttgggtctttatattgtcagttgctataaatgaataaaggctttttccttcttagtgtgttggtgaagaactaggagtattgcactcactgatcaggagggaacaggtctagggagtgcatagaagctttccaagaggagtggacaggaagcctgtcctccccctcgccctccacccccatcccgccccacctcctgcgaaggcaggaggaccatgaacctgcaatttggctgatggcagttaaggggtaatcaaaagtccaggcataggaactggttccttagtgtccatccaaagcctcaagaggctgacctggaaggatgcaggtgtgagaagccatgtgtggatcccaagtttaaggacatagatgttttccttacagaaatggaatttggacactatatggttacgtggtcagccagcaacagagttcaataataataaacccctaataaaatatttatgtttttccttatattacgtttctcctatgaaacacttattgattgattgattgattgattgattgattgattcattatactttaagttctgggatacatgtgcagaacgtgcagatttgttacataggtatacacatgctatggtggtttgctgcacccatcaacccatcatctacgttaggtatttctcctaatgttttccctcccctagcccctcacccccgataggccccggtgtgtgatgttcccctccccatgtccatgtgttctcattgttcaactgccacctgtgagtgagaatatgtggtgtttggttttctgttcttgtgttagtttactgagaatgatggtttccagcttcatccatgtccctgcaaaggacatgaactcatcgttttatatggctgcatagtattccatggtgtatatgtgccacattttctttatccagtctatcactgatgggcatttgggttggttccaagtatttgctattgtgaacagtgccgcaataaacatacggaaacactaatttcttagggtgatgaaactaatagaaacacagcccttgaatgtatttgtacatattgtagcattcacaattttttcagacctcataattgtcaaaatgaagggtggattttgagtacctctaggatttggaaataaattatgtgactttttacccaaggtcattcaaagacgcttgtgtagcaactctatatttgtattgcaagagctagactggaactttaaaatatcatcagatctctgtcaggtaaactcacagaaatgagcttattggtcaacacacttttttttgcatcttcagggtgccaggcactgggagaatcggggcaccacagatctgactccccacttggtggagctgacagtaaagcaatcacgtcaataatggcagcattctgcagcatatcaacagcaaagtagaatgcaccttggaaggccacagtggggacttaatctagcttgtgggccaggcaggaaagaagggccagcctcatagtgagaaggcttccagggatagtaaatcatgatgtgctgaaggatctgagaagagcccagcagggctgaggtgtagcaggcaggggtatcgcagtaaatccccagcaggaaacagatggcaggctcatcttagaaaacattgtgtttaggccaggtgcggtggctcatgtctgtaatcccaacactttgggaggccgaggcgggcagatcacaaggtcaggagatcgagaccatcctggctaacatggtgaaaccctgtctctactaaaatataaaaaaattagctaggcgtggtggcaggtgcctctagtcccagctattcgggaggctgaggcaggagaatggcatgaacccgggaggtggagcttgcagtgagccgagatggggccactgcactccagcctgggtgacagagcaagactccattaaaaaaaaaaagaaaagaaaagaaagaaaacattgtgtttaataaagggaccatttactatggtatgggctgagtgtcaggacaacaggctagatggtatagggctgtgtgatgatggacttgccaccatccttaggcctggaggggtcaaggggtcatggcgtaattcccagaacctggaaggggaaggaaactttggttgaccaatggaacaagctaagtaggttcattggggagtgagccaagggaatgagttactgagtttactcttctactgccttccagtctcctgtctggactcctgtggccctgaacacaccaaaagtcagagggcatggaatctcactgatgtcatgattactggtcagcctcatgagccagaaggcaggatggagggggaatgaacaaacagaaggaaccctcacaaaacagagagggggaaagagagatagacatacaagagagagctaggaaagttggcagtggccagattttaagagatacttggctcatattaagattaaggtttacttggaagtcactgggcagtcatctgtgtgatcagattattataagaagagaagtagcagactggagggtggatttgagaggagcaagggtggattctagaaggccatttgggaggtcatgacagctccctaggagttggggggaagtgagctaattcaagaatattagaagagtctcgttcagacagctgagtggacgtgcctttcactgatttaggaaacattagcattagaccaattatgggggtggggaaggagaaagcttaagtgcaggtgtgatcatggtcagcttgaaacacctctgaatacaattgggtggggtacaatgtagcagcgggaagttaagtctggagctcagtagatagtcctagatggaggggaatgttgacttatagatgggaatttagcaatggatatagtagaggtctctaaagagcacaggtagcatgaacagatacagaaggcctaggacagaatccataaaaatgtcaacatttcaggattgtgcagagacagatgactgagtaaagaagactgagaaggaacagataagtagtcgaaaaccaagtgggcagggcaggaggcaggttagggtgagttgcaaagtggctgagaaatgagaaaatgaaaccgtgggggctctcatcttctccaggaaggtgtgctgggaacggggaggggagataggggctagcaggcagagggtggtaggagcagagagagccctgctgggaaaggaggacttgagcctacctaaatgatgaccagagtcagtggagaggcaatggcaatggaaagaacaagggtccaggaggaacaggataatcatcagggaaaggttggaatgcggaaggcaaccaaagcatcctgcagagcgtgcattttgaatttctgtgatcctctggaaaaacaaccttctgtgcttcaatttaaaggaaggtgcatggactctgtgctcccctgattctgaaccacactccatcagcaaggccacatccacattcagagctccaggaagcctcccctatccctgtggacaggacttggggagtggccttgtactgcacaggtcactgtctccattctaacctaagtgagggaagagtggattggtccctggagtgtttacagacttggtgctgatggaggggtggtttaaaggatttttagctatttcccccctttctttattaagcagaagagaagactgggtcctgagagtaaagagtctgaggcttgagtaggttagagaaggagaaatggtcattttgtagagcaggagaggggatgctccttagagacactgaaggaccatttaggctggtgacggcaaatttattgtgacacaaatcttcccagctgtgggattttccccaacaacactcaacggtccagacacaggtataaaggtgttttttttttccccattcttcccttcctcttttccttcctgtctgatctatccaagttggagttcattacccacagattctatacataaatgccagtatattctatatatactaaagtctgtagattctagtaattcctaactcaccaaccaactacaaggtttaacaataatagaatcacacatatgtcacctttctaaatcattaacctgagagacgaaagagaagggggagtctgggggcccgagatcagtgactagagggtgttgcagcactaaaacatcacacgattgatcagacctatcatggctctttcactttcatgaacattttgtgttttgctttaacagaatttgagtcactcctataggtggctttagtggtccttccctgggtgttttctcagacttgtggtgggtaatggggtagcatatgtgtgctcacgtgacagagtggagttctcatcatttcactgccttcttggcaaacagaggcaatgagaacgtcaaaggcatcatttgcatttgtaaagcaaaagccagtgatcacatctgtatctaccatatggcagatgttccataattattttgaaaaacatatgagatttcagctgtgcagcacttattggagacttgaggaaagaaatttaggggcaagaaatttaggaatgagtattattttcctcttagaaactgacttctctgacttaccctaaatttagtacttccaaagagaataacagattttcatcattgtaaaatatcagcaaaaacagaccaaagtgctgccataaggaaaggaattctgttagtggtaccttgtctgtctagttgtgaggtgtggtcagctgcgtaatgctgtcacttccccaggatatccatgtctgtattagtctgctttctgttgcttgtaacagaattctagaaatgtgtaatttataaagaaaaggaatatggttcttactgttatggaggctaacaagtccaaggtcaaggggccacatctggtgaaggtcttcttgctggtgaggaccctttgcagagtcctgaggcagcccaggccatcacatggtgaagggctgagtgtgctgctgagatttctctctttctcctgttacgaagccacaaatgccactgctgtgataacccatgaatccatgaatggattaatcccattgtgagggctatgccctcatgaccaaatcacctttaaaggccccacctcttaatactgccacattggggattaagcttcaacattagtttcagagggagtaaacattgatatcataggcttttgcccctggcccccaaaactcatgtccttctcacatacaaatatatgcaatccatccccataaccccaaagtcttaacttatccccacaccaactcggaagtcgaaagtccacagtctcatctgtgagtctgtgaaatcaaaacgggttgtctactttcaaggtacctagaaagactcacagatttctattttcaaagtgataaataggcaaaaagaaaggcttaactagtcccaaccaagtctgaaacccagcagggcagacattaattgtaaagcttgagagtaatctcctttgactccaccttagcctccgagacactggggtgggagttgggcccccaaggcctcaagcagtcctgtccctgtggctttgcttggtgtagcccatgcagctacttctatgtgctgaagtctggtccctgaagctgtccaacgtgggcattgcatgctactggtgactccacagttttgggatcctggtggaggtcctgcctctatggctccattagatattaccctggtaaggactctgcagcagctctgaccctacagttacatacagcattgctctagtggaaactctttgtggtggcaaccccccctgtgacaagtccctgcctgggcccccaagcttttgatgacatccttagaaatctgggtggaggctgccaatcctctacaactcttgctttctgcaaacctgagaattagcaccacatgcatgctgccaagagcctgcagaattagcgctacatgtatactgacatgtgtattccttccagagctgtgccacaagccatacctagggtctcttgagcctaactagggcagttgtggagcaccgttctggagtgcaggaaacagagtcctctggtggccttgggcactgagcctatggagggtgcccttggtctagctcctgaaaccattctgccatcttaggcctctgggcctgtgatgagagaggcagcctcaagatctttaaaatgccttcaggatctcttttttctgctatcttgaggaaaagcacctggctcccttctattcatactaatatgtttagcaaatggtctctgagctacacccttgattttctctcctgaacacacttattaacttttcacttggccaagatgagagcttttcaaatctttctgttctgtttctcttttaattataaattatgtttttaaattattcctttggtcccaaatatcagcataagcagccaaaagtaaccatgtagctccttttatattttccttagaaatgccttgtgtcagaccaaggcagggggatcacaaggtcaggagttcgagaccagcctggccaacatggtgaaaccctgtctctactaaagacacaaaaaattatccaggtgtaggggtgggcacctgtaatcccagctacttgggaggctgaggcaggagaatcacttgaaatctgaaggcggaggttgcagtgagccaagatcaagccactgcactccagcctgggtgaaagaaactccatctaaaaaaaaaaaaggagaagaaagaaagaaagaggagtttgagaccagcctgaccaacatagtgaaaccccgtctccattaaaaatacaaaaattagttgggcgtggtggtgtgtgcctgtaatccaagctactcaggaggctgaggcaggagaatcacttgaatctgggaggcagaggttgcagtgagccgagattgtgccactgtactccagcctaggcaacagagtgagactccgtttaaaaaaaaaaaaaaaaaaagaaagtaagaaagaagaaagaagaaatgccttgtgtcagatatcctagttcatcattcttaagtttggccttccataaagcccttgggcagggacacgcttcaaccaaattatttgccaatttataggaagaatggcctttactcaaaatttcaataccttgtttttcagttctatctgagatctcatcagaatggcctttactggccatatctctattagcattctggtcaccaccatttaaccaattcctaaggagttacaaacttcccttagttttcttgccttctaagccctcaccagaatccaggctttttctagcctgctccctcagcttccatcctctgcccattacccagttccaaagccacttccacattttcaggtgttcactatcatcaacaccccactcctggtaccaattttctgtcttagttcgtattgcttataacagaatgcctgaaactgggtaatttataaagaaaagtaatttatttcttacagttatggaggttgagaagtccaaggtcaaggggctgcattttgttgaaaggtccttttgctagtgagggactctgtaaagtcctgaggtggtgcagggaatcatatggtgaggatgcttagttattgttcaagtctccgtttttcctcttataaagccactaatgtcactcctgtgataatctattaatccactgactcgttaatctattaatcaataaatggattacctcttaaaagtccacatttcaatattgccacattggggattaagtttcaacatgagtttcagaggggacaaacattcaaaccaaagcagtgtactgtctccaaaacctgtaaatgctaccttatatggctaaaggaattttgcagatgtatttaaatttaggctcttgagattagaagattattttggattaactattaagcctaatgtaatcacaagaatctttaaaagagaaaggcaggagatcagaaggatagtaaaagatgtgatgatggaataagaggttggaatgatgtgtctctcataagccaaggaattcaagaggtctttacaagctgaaaaagactttatgaggtggaaaagctttacaagctgaaaaagggaaatcagatattccccatgttccttcaaagggagtgcagcccagtttatatcttgagtttagttctgtgaaattgaacttggacttctgtcctccagaattgtaagagaataaatctgcattgtttaaagccaccaaacttggggtaatttgttatagtggcaataagaatctaatactgtagaataatttactttgagttttttttctctgagtttcaccaatcagctattccaatgtatattcattattgattttcctgcatagggaaggtaatgtcagcaataaatttgagttaatgtgttagctctcaatttacctattggcaatatagattcaaattagagaggaagcatcacctaccccaaagccccagcaatctagttcttttaactcatttcactcccagagtaaaacaggtattttggtaagggaatcactgatgttacttacaaacacaggctctcaattaaaaaaataaaattttctttttggtccaagctttctctttacacacctcaataccatcctttgcctacaaacttaactgtggatatctaaaaatgtctttatagggtaataacatttttccaaaagtcagtagcttaattttagaagtaaaacattttaatggcttaggctatagttttatagcattgggaatggaattttcctgtttttatggtaaatttgtttatctaaattgttctaattttaatctctttaattttgtatgacctttattttatttttaattgaagagcaatatatactgaatgggtgaagtttgtaaaacacttgaaacacacaaaaaagcaactcttgtagttctacaatgtagagagatactgctaacagtctggtatgtcttttattaaacatttacaattaggtgattgttttattctttttttactgcttcatgaacattttcttcacatcagtagacgttcttccatattacacttataatgacaacatcctagtttatcgtatgtatctgctactattagctgatcctctactgtagattcaggtcattcctgaaatattattattgccaattcatgtgctttgctcatttcttttttggtgtgttatttgaaaaataggtttgcaagcttttataaatgctaggcttattaatttttaaaaggtatgtataatcttcaaaggtcattatttgccttttaattttgtttatggtgagctttattgatatataagcattaataaatttcatgcaatcgaaactacttggcattttcatttagggtgtgtctgtgatgatttgtattctctttttttttacagataggttttcttttgtcttgatggtatactggattttaactcttttcttcttttagatcaaatgcatatttccttcttcgtggtggagcagtggtgtttttagtccttaactaaccacttagcttattctgtattaagaacattttttcccacttagtatatttttgaccctaaatctgctggctaacttgatagtctgattcatcttaaagcggctccaggctgaattcaattacaaacataaggatagtattactatcttctgtaaatatgcacatacttacattgtgagttaaatacctaaaaaaagtaatgtgcatctaatgaaggatctttttttttttgtcccagatgacaagataaaattcttagtacatggtttccatttttcatattttggtaatgtccccactattaacaacataaactgataaattagaaaacaccagatccttacaactgtattaaatttgaagaaaaaaatgatttctttctatcaaggtagagaaaaaagaagctgaataagctctgggtttctggaatgtctccattcagctctttctctgcttatgttccaaacaattgcataaaagcaatcccaaacaaatgtttatagggctgcactccgaaataaagataatgaattctacataacaagtacactctttcccctggctgtttgcatttaaaatgtacattttgcagtaattttgatgacttcattttgaagcagttcttaacagacattttggaaatgtctcatgtcatgaatttattcataaaccagcctgtcaaaaaccttagtgttcactggggagaatgtgtctcaaatgcacaagtggttgttccacctacatcatccaccatcttgaaatatcattattcatttccattacttcttggatgttctggttcactgctactgggtttcgcaacagtgtggagaagagaccatgacattgaattaccggctaagcagcatccataagtgttatattcctcccttaattatgatgagaacttgtgtttaggaagctgtgatgtttactgatatggttaatggtcaatgtcactcatcaaaagggtgataagacaataatgggatcttggaacagggaagtcaagataagcacaatgtgtcattttttcccctacaagcatacagtccttaatgaagacaaataggccctaatgtttatttgttcaatgaacatgctattggattgtgaacaagaggtcagcgtgactagcaatgaggtgtaagctgctctatcaaagggtgatatttagtgactagagcaagtcctagaatgttttacagtaaaccattgtagttacaacacattgtttctacccctctgatctccaagagacaaggaaaataagtggatactcttgtctttccaatctggaaaatagaattggaagtggatgctttttttcatttctaattcatagctctttgatcttgattattcatgaagcatatgcgtccatgaccatgtgttaaatcagcacttatcatattttattgtgacattcattcctgggaattttattaaaatgcagattcttgggtgggagctgagattctgcatttctaaccagctgtcaagtattactcatactgtttctggtccatggaccatactttgagtagctgactgattccaacttgcaagacagagacagcagaacctgcctacatagatttagaaccttgtctcataatagtgcatgtatgcttagtgaggcagcatagtaacatggataaaagtgcaggctctgggtgtgaattctaccactacttttgctaagctttgtgtagtgccagtcacccctatagtctctgtgatcaatgacaacaaagatttattttgtgctcacattacgtgttggactgactgttggccacaagtgtgcaaattctgggaaccactttaaagacagccttctctgggacatgccattttaccctcatcttttgggaacctacaatgactaaaacttctgctcggatttgccgatgtcatgtccactcacatgctattggcctgagtcaggaacatggccaagcctgatgtcaatgaagcagggaagtagactccttctgcacacagcgtgtatagacatatggcctcctgcaggaaagggagtgaagagttgggacaagaacacacttttccattgtgacttagtagctatgtactcttgttattttcacaggattgttttgaggattgaataagctaaaatggatagtacattgtacctacatgacacttaggagaagctcaataaatgcctgtaattataattgcttttgtttttgttctcatacttcaccctagtcctcactgcacagttgctgtacccttgaggttgagaaaagtccctctccctgcctttcatgatacatgaaacatactgaggcccactaaataccaaacaatcagatcatctgaggcatctgcagttaaagaaaactggattactacacaatcagttatttccaaataattttagacaacgattgacttcttcctggccatcatattttctgagtttttgacttgagtttcagatcactagatttcccctgattattctctgaatttgttttatggcctgttcttgggtcgtttgttctacagatgtgtactgagcatccagtgaaagtcagctgttgtgtgaggagcaaagattcatataaagtgtggttactatttaatgaaagtttgtgagtacactcttcatagacgccctcattcactgttatctaattgccaggcagtgctggatgagggtgcaaaggtgaaatccagcctaaataaataggagtctggggagcttgagcatatttagttagccaaggggaatcactatagcttgtgaacagtccaggaatatgaccttggatttcgaaaaaaaaaaaattgtgggtagtatatgtaagttgttggagcctctgccattgggcacttggtggagtgagattatagggctgtgagccagagcatggtgtagtgaatgggatagatgtgtttgtgtgagaggaaaatatccagtggctgcatagctctgaagattatcagtccaggcaattgtggacaggcaataagtttatgtgatggaggaggtagtgcattcaactggggccgagagtttgcgttgtgaatagtataacaagacacagatgttggaaaaaggggttcaaataatttgcagaccagctatccaggtcaactagctgatgatccatgacacagtgcatgttaaaggcctatcaatcttattgtgtagaaggagtatagaccaagggatacgtagtcattaaatgctgaaggttgagatccttgttgatgcaattgttcactttactaagaggtactttttttttttcaatttgactaagaacaggcctgaagattatcagtccaggcaattttggacaggcaataagtttatgtgatggaggaggtaatgcattcaactggagccgagagattgtgttgtgaatagtataacaagacagagatattggaaaaaggggttcaaataatttgcagaccagctatccaggtcaactagttgatgatccatgacacagtgcatgttaaaggcctatcaatcttattgtgtagaaggagtatagaccaagggataagtagtcattaaatgctgaaggttgagatccttgttgatgcaatggttcactttactaagaggtacttttttttttttttttccaatttgactaagaacaggcgtgctttactcataacacacttgtttttggtgcagtatatcgcaaaacaaagttgctgtgttaagtttaactgtgatttaaactgatgttgcctgagtccccaaagaccaatgaaacacaagtgggatggaaaaagcagccacttctattgttgccaaatgatagaaaagatttgaaaaatcaaatgcatcaggttagcctcactgtgcagcaaggaaaaaaatgaattaattataaataagatgaataaataatttaaatatatcacttattgcttctttattgcttaacacttgaaaaattgtttcaattagaaacttaaactcaatttgatagacgaagagtgtgcagctcaagataaatgtaaatccctttgcgatataaaaatttgattttgcagtatgagctctattaaaaagaaattaataatctctagaaaaagaaggcagtgccaaggaaggttggccttttcccacagaacattgctttttaagaggaaaaatcagtaagcttattatagagaaaattttttaaaaaatcagaaacgcaaaatactaaccaccaaccccacaaacaacaaaactaataagcatttgtctctctggatttcatattaaaaccgtagagtaggtttttgtgcttcttatatttcacatgattttttgtctaagccagacaaaatgcttcattctctctttgagtttgttgggcctataaaaaatggtagaacagtccaggcatcgtggctcatgcctgtaatcccagcactttgggaggccgaggcaggtgaatcacctgaggtcaggagattgagaccagcggggtcaacatggtggaaccccgtctctactaaaaatacgaaaattagccagccatggtggcgtgcgtctgtagtcccagctacccgggaggctgaggcagaagaatcattggaacccaagaggcagaggcttcagtgagccgagatcacaccactgcactctagcctggggacagagtgagaccccgtctcaaaaaataataataataaaataaaacaccagaacaatttcatattttttgtacctaaaaagcaagggatttatgtatctgaagtcacaatggaccttacccaagacaagagtatcctggaaagttgctttgattcctgtgccatcatgttctaatgctgcaaaccctctctccgcattcttggcagatatggccaattaatgagatcatgatcttttgtatgtccagtctaaacctcagaatccctcccatcacaggcctccagccagccacttcttggcacgtggtatgaaacctactgcccatctgtcccagcagctgaaggactaagagttcaataacattttatctggcacatgaacaatttgcctgatttcttaactacgtgcaaacatctatcaccttatgttttagttcagtctgcagaaatgagttctttctattatgtatagaaaaaaagcaaatgtctcaggaaattatgtggcctatgtattttaccttttggacctaaatatacatctaagaactaaatatggcctgagaatcagctcccctcctccccagaatctcataacaaactgaacactcatcatccatcaaaaagcaaacacaaaataagaaaacaccagctgggccacaaatgccagtccaggcagctttcaattaacattcagagctgtcagaaactctacagcaggggtagaaaacggatggtctcagcccacagatgtcttgcttggccagaaggagttttatttctttattctggccctatgtgggtcccctcctctccaggtatcataggcttccatactgccccattctctttatcccagtgacatctgaagacccctgactttgtgattcctgatggcagaattctgtctttcctcattctcagtcacatatccgtttatctctcttttatggactgaatcatgttcctccagaattcatatgctgaagctgtaaactcctaatgtcactgtatttggagataggatctttaaagaggtgtctaagttaaaatggggatattggggtggcccctaattccatgtaagactggtatttaagaagaggagatggccgggcacggtggctcatgcctgtaattccgaggcaggtggatcacctgaggttaggagttcaagatcagcctggccaacatggtgaaaccccatctctactaaaaatacaaaaaattagccaggcgtggtggcgcatgcctatagtcccacgtactcaggaggctgaggcaggagaattgcttgaacccaggaagttgaggttgcagtgagccaagatggcgccactgcactccagcccgggcaacagtgagactctgtctcaaaaaaaaaaaaaaaaaaaaagaagaagaagaagagattaggacaccgggacacaaagagggatggccatgtgaagacgtgcggaggaagacgaccatatataaacctcaggaaaaaacctacctccaaacaccatgatctctaacttctagcctccagaactgtgagaagcaaatttctgttgctaagatccagagtctgtggtctttcactatggcagcccagaccaactaagacaccatctctagtcctgaaatcgtgaggaagcagcactccccaagtcaatctacattcagtgagctgtggggaaatggactgcagtgctgagcttcacggcctgagtccctaaggttgggatgaagacaatgtgaggagagtcactttgatttatagctccaacaattatgaagcctcttaggaatagggcaagaaagcattttactgtgtctcgactccaagaactataatgacatcttttaaaatttcattattctttttgtttttttgagacggtgtctctctctgtcgcccaggctggagtgcagtggcgcaatctcggctcactgcaagctccacctcctgggttcacgccattcccgcctcagcctcccgagtagctgggactacaggcgcccgccagcacgcccggctaatttttttgtatttttagtacagacggggtttcaccgtgttagccaggatggtctcgatctcctgacctcgtgatccgcccgcctcagcctcccaaagtgctgggattacaggcgtgaaccactgcgcctggccttaaaatttcattattctatttacaatataaatagcaatactaagccaacgtaagcggatattgtcagtgttgcacgctttattagagcttcttggaagatagacataaacacaacctgccatccagccgtgtccacgtgatggcttggagaggcttttgcttcagcagccagtcagtactaagcatatttctttttcttttctttttttttttttgagatgaagtctcgctttgttgcccagtctggagtacctctgcctcctgggttcaagcgattctcctgccttagcctcctgagtagctgagattacaggcaggtgccaccttgcccggctaattttttttatttttatttttagtagagatggggttttaccatgttggccagggtggtcttaaactcctgacctcaggtgaaccacccacctcagcttcccaaagtgctgggattacaggcatgagccactgcacctggccgattgaatgtatttttctatgaagaccttttccctgttttatgaagcatcaactgtgcattctgggtggaataacaaatctgagtggaatacttactatttacttgttatgtgcttcctagaacatgttacaaattcttatttattttttgtgctgtatgctatagcatcccaaacatctgtgatgctgtgttacactagagacaacattctcaggcttgcatgcacactcacatacacatgtgcacacacaccctcataacacacaattactccctccacaagtcaatcaaccaatcatttatacaacttcatcccatagagtgttctttaaatttcaagcccatgaaggatggtgaattctcaaagcaatttcattgcagagggcaaaacgagctgtcagaactagtataggttctattaagggtaagataaagtaaactctaatcagggccagtaagaaaaagctaactacgagaagcttgagaaagataaacgtttgcctggccaacacggcgaaaccccgtctctactaaaaatacaaaaattagctgggtgtgacggagcacacctgtaatcccagctactcgaggggctgaggtaggagaattgcttgaacccgggaggtggaggttgcagtgagccgagattgcgccactgcactccagcctgggagacagagcgagactccatctaaaaaaaaaaaaaaaaaaaagaaagaaagaaaaacgtttgcatcctagggggctatttaaccaaaaggtgtatggctcctgtgagctccagatagtggcttgtgaacctctgatattagaaaggataagaaatcatccgtttctgtactgagcctcaaagagaagactcagccctagttaggaaatacaaacaagacctatttccgctaaattggcaaagccaccaatcagagccatatagactttgtgtggtcaagcttcccaccactgatttcatgactcctaacggtagaattctgtcctgtgaggctgagaatgaacatctaactttaagaaatacagcagaggccgggcacggtggctcacgcctgtaatcccagcactttgggaggccgaggcaggcggatcacgaggtcaggagatcgagaccatcctggctaacacggtgaaaccccgtctctactaaaagtacaaaaaattagctgggcggggtggtgggcacctgtagtcccagctactggggaggctgaggcaggagaatggcgtgaacccgggaggcggagcttgcagtgagccaacatggtgccactgcactccagcctgggcaacagtgcaagactccatctcaaaaaaaaaaaaaaaaaaaatcaatctactccttgcatcatgtgtgacattttaattacctaggcagcttatcaggacataatgaagcagctgctatgattatagaattttgtcccaattatttacaaagctgctcagctacagaaatgtctcattgtcatatccagcatgcttaggttctagagcaggtgttaagcctgatttactggccaaatcagaaaattattccatggccgtcactttttctttggagccaaaagattaaaatttaagttattctctgaaagtgtgattttttttttttttaatcttgattgtcttcttccggctatcagctatctttcctcgtcgtcctgaaggtcttaatgtttccctggtttcattctctgtcttcttggtgttatcaaactctgctctatcggcacccttccaacaggtgagtatgcaatattctgattctcccaaaggataagatgaagcgtttgtagcaaaatgcttttcacagacccctagtaatacttttttccaagcataatgaataccgactatgcgccaggcaatgagataaaaatactcatatttttttctagtaggaattctaaaattagattctgattgctaagcagaaaacagttcttttaaggctacctctaaattgtggtgctatatggttgctgaaatccataaaacagtataaaaaggtcaactgttaaattaatctttgtgattgattattgctgtccttgcaataatctggtttaagttagaagttgcattgtggctttagttttaaatcgtcacagaatcccttccatatgcttttacagaaaagagagtatgatattttaaaagaagttcacatggaacattctctagggaggtagacatattgtgtgggcctaaatggatgaatttacaggatgctggaacttggagaaagtggtcaaaagtagctatcactgcaagttacctaacattactaccttgaggccggggaagttggagataagaatgagtgcttccaaataaaaagcagatggaagaaagggacctatatggataagagatgaatgagtttctactgaggaggccatgcttatgttcccattgtgactgggatggctgagatacagtacttcctctagtgaaggtataaaacaaaagttatttttctcattaaaaaaaagttacactttaacacaaaggggaaccaaatttacttacaaacaaaacaagtaaggatagacagggtcacacccccatggcctgaatttgcataatgttgtccttttagattaagaagaaatgtgtgctgatgaattgttcatttttattcagagcacagaaatctagtttcagaaaagaagtgtaggtctacttgagtcataatgttttcttattgaataacatgcattcatttcagaactaaatgcatttagtttattgggaataatgaagtaattcttggaagagggcgaggaaagtggacagcatgttttattctggtgttgatttgcttggatgttccacagacagtccaagctttttgtaggtcagagaaacatccttaacctggggcaaactttgacacccagcagatgccttcaatcctctttatctatcatagtgtctgtttttctgtggtctcttttactacttcaggtttgctattaatgattatttgaactcatttcctcagtatacaattgggggaggagtggagaagattaatgtcatagtgtcattttttccctgtattttgtgggtctgacctcgaattctgatccttatactctcttaagtttatacatggatagaatgttgtatcagaatgtacttataatggttgcctttactaagagtatattaattatgggttgagcttataattaattgacttcatgattgtaaaagtgaagggcctggtattacaccgaactgcttcttagcacaaagtaggaactcaatatatatgagtggaatggatgaataaaagtgagtataaataaaccatgactgctaagatgaaccactgttcaattgtaaacaatgcaagataacccaatcgttttgacattatgagggacgtgcatcttttcttgagaaatggggtgagacattaagtcaggggcctgatatgaggaagtggtagattcatttgtaccagctgtttagtgacaatgagaagagattacagaagtccagtgtgtctagactaggccacatgtgatttttatcttaaatctgatagtggcatgccagttaggacacatcattcggcaagatgtaattgatatctcaggtctgggaaaaaaccttaaattgttttgtgctcttctgagtggctagtatgcaagcccgcacatttaagattgacatcacttttgagggtgtttctgcccctgagtagggacctgccacatggtggcaaatgtgtttctgtgaaatactttcccagcctgtatttcatggactagtcctaggtggtctttgcaaaatagaaaaaagctgtgtccatgttcaatgattcaatgtatttagaaaattgccatacgtttcaaatcgagcccttgggctttggaatcaggcagggctgggttcccagttggcaagtttgcaaactgtgtcatcctgggaaagtaacttagcctctctgagtttcagattcgtaatatgaaaaataagaataataacaccaaattttggggactgactgatgattaaacaggattccatatccatatcatatttaagcaattttagtggtagcctatagtaactaaactataaatattagtgattacgaccattattatgattagtattggtttctttctcttgggtatttaaaatagacataaggaactctgacgaatcccaaggtgaagaagtcactgacttgccttaaccagcagtttctcactctatttgaccaaaggtctggctttttcacttagcatgaagatgccatgtcccctgcagcaccttttgagaaaacatctaagtgcactacttctcaaaattcagtgtcccttcaagtctcctgggtgtctcgttaaactgaagattctgattgattaggtccaggtgggctcaagactgtttctaaaaagctcccgtgtgctgctgatgctgctggttcgtggacctcattataggtagcaaggactgggagcccgtgactatggtacctgcatgtctgaagtttatatgtggatgatttctttctttctctttcttcctttcttcctttctttctccctctttctttcttccttccttccttcctttttttctttctttccttccttccttccttctttctttgttttgttttgagactgagtttcgctcttgttgcccaggctggagtacaatggcacgatctcagctcaccacaacctccgcctcccaggttcaagcaattctcctgcctcagcctcccaagtagctgggattacaggtgcccaccaccatgcctggctaattttgtatttttggtagagacagggtttctccatgttggtcaggctggcctggaactcctgacctcaggtgatctgcccacctcggcctcccaaagtgctgggattacaggcatgagccactgtgtccggccagatgatttcttttagatgagataattgcatatcagcattagggaaaaaataccatctcaatggaaaatgatgatgggagtatgtggaaaggaaagaaactagtagtctaccattttatgtgggtctgtctctacccttctggactgtaaattctctgaggaggcagatgtgttggtttcctcactgctctatcccaatgcccatggcttttcttggcatagcatagacagatacatacatattaaatgactgaatgaatgaataaatgaatgaatgaacgacaggacaccgagtcttttcatcctgggagtcccattacatgccacatcccagaggttggcgggaagccatactgtggtaactgaaagatatgtacaagattaggatttaggcagcatacgaaagccttacttttatgctttatttattgaaagtactctctattttttgttaaaagtctgtactgctattctcctgataagtgtattggccagtgaggccttcctgcccttattttaggaaacttcaggagcaccttttccatggtgggaccacaaaggcagttttccatcagagtaattccacagtgagctcaaggaagggtacaaggatggattgaataatttctcttacagctcctgaagctctctacaagggagtattttcttattagtgttatcacagctcctggaggataatagacaatcaactgaggaggtcctcaaatgagatttctcacagatttgctcatcagtgtggtgcaggttcatagctttaaatctcaccaaagatagtttatgtttgtggctcaatgcaaattgttttgcccacatctaaatttatttccattttatttgtattggtctctacttctaaaaagcttttagtgcagaatcatcgagttgacttggaagttatctttctgtgcatttagactttatgaattagaagactaaatggtatattttaaatggatataaaaaatcaaatgaataaaataggccataattcagctttgtttagaatgaatattgtctcagttcacttgggctactataacagaatgtcacacctgtgtgcttctcaaaaaccaacattctccccccacagtactggaggctgaaagtctaacattaaagcagcagaaggttcggcatctggttagggcctgcttcctggttcgtagatggtcatctcctccctgtattttctcacagtggaaaggaaacaagagcactctctggagtcaattctatcagggtactaatcccattcctgagggcttccatgaattaatcacctcccaaaggctccatctctgaataacatcacattgggggttaggatatcaacaatgaactttggggaggcacagatattcggcccattgcaaatatatttgtgcaaaggagattctaataaatgttgacttgtttctgtatgttaatccaaagcacgttgtattagtccgttttcacactgctgataaagacatacctgagactgggtagtttataagaaaaaagaggtttaatagactcatagttccatgtggctggggaggcctcacaatcatggtggaaggtgaaaggcacgccttacacggcagcagacaagaaagaatcagagcctagcgaaaggggtaaccccttataaaaccatgagatcttgtaagacttattcaccaccatgagaacagtataggggaaaccgcccccatgattcaattacctcccactgggtttctcccataacacatggggattattacaattcaaggtgagatttgggtggggacacagagcagaaccatatcacatgtttttgtatattctctaataaaatgaataataaatagttataaatatataaaaatatttatatatttttgtatatatttataaataaaataataaaagatgagttattttataaatttgttttaaaagaaaattttcttttaaaatattttcttttctccaaaaatattgcatacctattagattatatacagaagcaaatttgacctttccaattttttaaaggtctgtatgtgaagaaagagaagaatgcgattttttaggctactttgagctatgctccccagagttctttaggaagcaatggattcttcaaattgggcatccttaaagcatcacagtcatttgccttcaacaatgcagtgctcatggacatatgaaagacattttaatgcagttttacatgtgacaagttgaaagcgtcttccaagagttccaccacactggtgctgtccactccattgctcgggattctttgcagtgatttttgagaggtgtgggccttttcctctttatgtgtcacgtgactccacagatgcctttcctgtgtcacccgcagcagatattactttcccaattaaagtccttttaaagaatggcttttctccaaaagtggaactgaggccttttagtggtttcttgctatttttgacacacatacatgtatgcatgcacacacacacacgcacacacacgtacacacacatgcagatagtagcaggtttaaagctacacattccacatcaatttctccccatccctggcttccaagtgcacggtttggtattgctgtctgtgttacacaggttattgctgcaatcccatgtgccggtgctggtcaacactgaagagctgtgcccgcacctcatctattgtaaatcagtgccagccttagggtaaattaccttcctggagtgagaactgtaacctgctaatgctgctatgtaacagtctcagcaatgtctgactccttcttcggaatgttgttattgaattaggtgttatccaatgtccacttttacactctcccttctctcttttctgtaaagaatttggttgcattgtttgtctcaaggatgaagaaaaataccaataaataccaccagcaacctcccctggcaggttcaggacataagctccataatctgaatttccctcctatgtttcatgaaggtagatgatgtaatccctatgtgatccgcctcagggcagtcatgttaaagtgtgacccacctgaattctcaactaaaatttaccatacaaaaataagtggaaggtcacttgcattacggagaagcaattcttaatatgacacttatttatttaataagtacagactgaatcccagctatgtacaaagcagaaagtgatttttttttatttattttatatttatttattttttagacagggtctcactctatggaccaggctggagtgcagtggtgtgatcatgcctccctgcaacctcaacctcctgtactcaaatgatccttccacttcagcttcccgagtagctgagtctacaggtgcatgccaccatgccctggctaattttttgcattctttgtagagatgggacttcaccgcattgcccagactagtctcaaacttctgggctcaagcgatcctcccgcctcggcctcccaacatgctgggatttcaggcttgagccactgcgcccaaccaggaggtaattttaaaactcacaagccacacttcctttctgtgagaagtttgtaatttaggatgaaaactaagatgcttaggctaataattaaaatgaaagcccattaccgattcaaagtaaaatagaagttaagaaaggcagaggccacttatggtcagttggttaggaaatagttgctggacgtgataccattggagttgggcttggagagtggggcttaatttctggcaggactagaagagaaggtttttttttttgttgttttttgtttttgagatggagtctcgctctgtcgcccaggctggagtgcagtggcgtgatctcggctcactgcaagctccgcctcccgggttcacgccattctcctgcctcagcctcccgagtagttggtactgcaggcgcccgccattgcgcctggctaattttttttttcttttttttttttttttttgtatttttagtagagatggggtttcatcgtgttagccaggatggtctcgatctcttgacctcgtgatccgcccacctcggcctcccaaagtgctgggattacaggcgtgagccaccgcgcccagccaagagaaggtatttaaagtagaggaaaatgggaagaagatgcagtagcttgaccatttaatgatgaaacctagtgcagtttggctacagaatgtaagtaggacatagctgaggtctgttgagaagcaataatggcctgggttggggtggtttctatggaaatgcaaagaaaagttaattagctcacagcgtgagcttagtacattcatctctctgtatgtgtgggggattggtttcgggacccccaagtataccaaaatccaggcatactcaagttcagaagtcagccctatataacctgcatataaaaaaaggttgtatacttcagttttccatccctcaaatactgcattatcaagctacgtgtggttgaaaacaaatctgtgtctaagtggacttgtgtacttgaaatccgcattgttcagagagtcaattgtatgtacattggaagagtgattgcagtaatgaatgctatttactaatctgatgttctgccgttctatatgctggaaagtaaacacatgataaaatttaaaatgtacaaaatgggccaggcacggtggctcatgcttgtaatcccagcacttggggaggccaaggtgggcagatcacttgaggccaggagtttgagaccagcctggccaacatggtgaaaccccatctctactatttttagtagagatgttaaaaaattacccgggcatggtggcacgctcctgtaatcccagctactctggaggctgaggtgggagaattgcttgaaccccggaggtggaggttacagtgagccaagattgtgccactgcactccagcctgggtgacagggtgggactccgtctcaagaaaaaaaaaaatgttactattaataattcaagagatacatgttaaacatcttgttttgattttgtggaatttaactacatcaatcgcctgaaatatggccacagaaatattctagtattataccatatttagtgtacataaacaattcaagtactagtctgctagggtcccataacaaagtacttcagactagtggcttcaacaacagaaatttattttctcacaaacctggaagctggatttctgagaccaaggtgtcagcgaagctggactctcctgaggccattctctgtgtgtctttataggcccacccctctacatgttcctgcatcctcatctcttctttttgtaaggacaccagtcagattggaacaggacccacccatatgacttcgttttaccttaaatacccctttaaagaccctatctccaaacacagtcacattctgagcaactggggattagaaattcaacacatgaattttgtggggacacatttcagccggtaacactccacacacttgacttttcaagtttcttataatatttttagttcataaataggataacaggagatatatatatatatatatatatatacacacacacacacacacacacacacgtttatatttggaaataggtgaggcacaaaattataaatggtaagtaaaatactgaaacccaagtcacctttacaaagtttaggtggccaagaggttgcatgtcagtttctagagcctcatcatgccagtatgcaggtgggtggtcccttagcttctgatagaaagaacatgggctctggaactttgtttggaaagaacacgtgcttcagcacaacttgcatttaaggccagattctgctatttacaagcagtgtgacttgtctggctctgcttccttgacattcaaatggagacgatgacatctacatctgcgattgttataattgagaagatgcatgtagaaagccctaggctcctaactctgcttgtaaaggtgagattcctacatggtgtgaatgaggacacacttctgaatttgatctgtacatcaggtgtctgttttttccttcccatggatatagctgtatatataaatcttagttgtcttttttaaagaaaacccaagctccttaccatctggtctctgcacaccttccttaccccacccagccctctgctcactatgcagtggccacatgggcatttttctattccttggtgatacccaggtaattccacttcaggctctttacactgccatccctttgccaggcccggctgtccctccaggtcactcaagtcctggctaagggtccttcacttactatgtattctgaagtcacctcccatcaactcacctattttattttcctcttaactttttatcatataaaattatttattgatttgctttttataccatttgtcttcctcacctttccccactggaatggcagatccatgaggacagcagcttcgcctctcttattccctattgtaaactggaatagtgcctgaatttgatacgcatgcaatgagtacttttacaagaaaatgttataaatgtgtaacagcattgaagggtataaacttccttcagataaatttggcaatacatattaaaaattaatactgacgtctgaaccaaaatttctcttcgtcagaatccattccatgaaatgattgaggaagtttttaaaaagtttaagtgtgtttatcatcagtcagtcaggctatggtaataacatcctaatagcccgtcttgcctctctctactctccttctttcatacttcagcccaaaatacctttcattcccatttttaaaaatacaccaaaatgatcaaggttaaaaagtcaaaagtctaatatagtagaaaacaatagttagctattccatcttttctgagcccttccatgggcaggattattcaaacacaagtttagtctactcacactctttttttttttttttttttttttttttctgtttttgagatggagtttcgctcttgttgcccaggctggagtgcaatggcacgatgtcagctcaccgcaacctctgcctcccgaattcaagtgattctcctgcctcagcctaccgagtagctgggattacaggcatgcaccatcatgcctggataattttgcatttttagtagagatgggttttctccattttggtcaggttggtctcaaacccccgacctcagatgatccaccctccttggcctcccaaagtgctgggattacaggcatgagccaccatgcccggcccacattctttatgatttttgatatactgaacttcttttcacaccttacttttgacttctatttgtcacactttatcatccttatacatccttctttctttgtttaataagtttttcttttttacttttactgtacttacttagaatgtatatattctatttccatttatttagatgttaccttggaaatttaccatgtacatttaaattagcaaaagtctgcaattaagcaataacctaagcaccttcttccatgaaaagcaaacaaaaaacaaaagcaggttttggagcattttgattctgaacactcacctcaaaacctacatgcttctgggccaggcacggtggctgggtgacagagcaggactccgtctcaaaaacaaagaaacaatcaaacaaaacttacatgctcctgttgttttctctacttctatatatttatttttttttaacccagatactaggtattattttattattagcttattcagatgttatttctttggatttgcttactgttttataatttcatttgttcattcttacttggatcccaaaccatctttttaaggtcgtgttcctttttcttgaagcatatcctttagaattttctttatttcaggtttctttgtggcataccctctcagtttttgttatctttacccatccttgttttatctttttcataaaagagtatttggctgggcacacaattctgtactgactatatattttccctttgtactttggaggtaaaatatcattatcttctagctttcattagtgctgttggaaagtctgaagtcatttaaattgtttcctttttgtaggctgtttgtccttgctctatggcttcatttaagatctcctctttgtttttgatgttctgtaattttgtcaaagtgtgtttggacacaaatttctttttatatattctgattttatttatctcagtatattgtacttttgggatttttaatacatattttctgatagttctaaaaattgtatctttttaatgattttcttttatattcctgagattccagttagttatctatttagtcttctcattctgtattttatttatcttagtgtctctttcacattcttcatcacaattctatttttgtcttacaaatagattatctcctggaattcttaatgatgatgatgatgattattttcgttttctcccgttttctgaattgtgtttcatccaacgtttgtatttttatatttgttgccttggtcttcctccttcatgatgcaagcattccttgaatatctgatggctgttgatttccatttatattaaagattgagcagataggaaggaaacttatataagtgggcaagggttatggaatagtctttgttgctttatgatgtgctgttgtctgaaggttttcggctcccaccaaatttatatgttgtaacctaatccccaatgtgatggtagtaaaaggtgcagtctttgagaggtgattaggtcataagtgtggagctctcatcagtggaattcgagcccttataaaagaagcccaagggagctcattggccccttccatcatctagggacacagcatgaaggcgccaactatgagcaatgaaccctcaccagacactgaacctgccagtgccttgatcttagacttcttggcctccagaactgtgagaaatacatgttgtttataagtcatccagtctatggtatttttgtgaaagcagtccagcagactaagatatagtgagagagatcggtgcttcagaatctgctgacatcttttggttgctgacagcttttcctgttttctttgccataatgattttccctcttttcttagctcattactcttattttaaggaagcttaaagggaatatcaatagctcattctaccatcttgaattaaaagccacatgtaattttttaagaagaacactctcattatattaatctcttgcttgaaatatgctccttgctgcccattgctcatagaacaaagaccaggatccttacgttggtccccaaggccctgaacagccttctccccagagaatttccaccttcaccttaaatcatgctccatctggctttctgtgctcttttctcttctgctagtccacaatgactcctcctgtctaagggatgtgcacacatcatatgctctctgtctgcagggcctttctccttcctctggccctcacaacccctgctccacaactgcaacctcctaatagatcaatttaccctcttgtattatctcagagcatcagagatcttctttgtagtacttatcaaagttgtgatttttctttcatttctatgactatttgattaaatctgtctcatccgcaaatagaagtgggcagctgatcataatcctgaaagacacagtacctagaacaccataatcttgaatgttgaaatcctagaaagtcaaaatttgcaaagtctaaaatcctgaaaataacaacactgaaagatcaaatccccaaattataattctggaagaaataatataaaaaattatattagaggtatttatttatatttttaaagggggatttattggaaaaacataaaaacatcatcgagaaacatgataggccactttacacaataaaataagcaataataacataaatatttttgcaagcataaacactcaggtatactaatgatagtcacatgagcataacagttaggaacagacagcacatattcataaagaaacaggctaaaaagggaaatgtataaattcacatcactatggttggttattgtgtgcacccagctttctaactacagtcgtctgaaataccatgatgaacaaccttagtcttttgacgagtcaatcaaaactgcaaaggttcgccaccgcatttgcaatcgcccaaagaaccaagatctccagaaattgcatctttcacagatacaaatgtacaaaaaggacatctcttcatttattgaggaagttccaatgtttatactttgagaaccagggatgccgacgatgtgtctctcagtccaaggttgaaaacctcaggatcctgggagctgctggtgtaagttcctagagtccaaaggttggcgaacctagagttctgatgtccaaggcagcagaagaaacatctgtcccagctctcagagagagggatctgtgcctcagaatccgttgtaagcttttgttgctgacagctttttccaatttgccttctgtatttgttctttcctggtgcccagcgaattggatggtgcacctgacaacatggaaggcaaatcttcctcacttagtccacccagattcatacggtaacctcttctggaaataccctcacagacacactcaaaataatactttaccaggtttctaggtattccttcagttcttaatcaagttaacacctaacattaagtccactggtgaccacattaagtcactactggtcaacgtgggtaacttggcacccatattcctcgccttaaaccatgcttaataacaagatggctagatctgcctaacatgatgcaactattttctgatagtgattttcaagattttagatattagggattttaggctttagggatttgaactttgagatttttggtctttagggatttcaatctttcaggatttcaatttttgggatcatggcatttgtgattgtgtcttttgggattatgatacaaacccaacaaggggtcagattgggtttgaaaatgagcaaaattattttgtaaaaattataattatatgttatataattattacataataattttgctcattttcattccttagtctccatgtagtgaatgaatgcataactgaatgagagatgaataatagcagtaaaggaccttggatggtttatcttatgctattttttgaggatattcaggagatctttgttgaatctgttccatgatcatggtaagatgtttaagctgaatctcagactcaccgagatagaagtaagtgatgatgaagtaagtgatagaactaagtgatgatgaatgtggcttccagtatgaacatgacttatttatgtctaataatgtgttccatttgtacagaactttaggctttttaatatagtttcacatattcagattaattttatcttcatatttttatgagacattttgttggttcatttagatgaactggaataagactgactcatgtctctgcaggttatgagacacatttagaaacgaagatgctaggatcatcaaccacatggccaggcaacaaagaaggaaaggaactgtcactcatgtgtacctttccgaaagtggagcctggaaggctgtttgagctcccaggcagtctggagcccatgctgttccattgctccttcatgtacaacccacggagcttcacctgaccattaacttcactcagtttgattcccagcacaccagcctctgtctatgtctctctcacatcactttccactatgaattatgcttgttcttcccctctatcacttctatgctctttcactctacatcttttattaaaatctcagagagagagaaaaaagattggtcttagggcagaactctcatagtaactaagtcacaggccgcctgtcctgtatgatgtggtgtgcaaagcactgttgtcttaaagtgctctggaagctcccttctggttgttggacagcatctcagctagcacttccccttgttcccagtggggaagcctcaacccaatttcagcttcccatgggaccaatatcttcctttttcagggtaggggggatgcatctgaacccagcttctactgtgtcttcaaggcttccgtattctggggatctggactttccaaacagttgcttcaaacagctgacatctaaattcatcctgcctggtgccccggtagctggattattcccttacttacaagattgctctcacacttgccttgtttaaagggcaggcagcctagcagaggggaacttcccctagaattcacagccacactgcctgcccaccacagtgtcttggcccaaatgcctttctatggcatcagagggaaaatcaggggcctgtgctttcttttgcttacttaccttggcttgtaggcactttgctgaaatgtgttaggttggtgtagtgggttgaacagtgtttcccaaacattcgtgttctcctggtacctcagaatctgaccttattttgaaatagagtatttgcagatgtaattaagttaggatctggagatgagatcagcctggacttactataagccctaaatccaaggactggtgtccttctaagagagaggagatggaaatttagacatgaagacacagggagaagaaggccatgtgaagacggaggtagaaattggagttgtgtgtctacaagccaaagtatgccaaagattgctggcagataccagaagctaagagaggcatgggaattaacactgcctacatctcaattttggaccaaatttctattgtttaaagcaaccagacatgtggaagtttgttatggcagccctcagaaatgtaaacagctgggtttcctagaagtagaacctgagaagggggttctcgtgcgagggactgatgaaggattggttgaacaagggttaggtggggagctgcgtaagtcagggatgtggtttcagctggggactggcctctgtctgacctcacaggctggctctggcgcacagagcgccctgcagggatatgatccacctgtggcaatagggccaatgctttgacccctaggtcagccagttactgactgtgggctgctgggagtgagcaatgcctccagcaggagctgctttttatttgacagaagacagctctccgggacagggtccaccaccgcggcgattatggcaatcgttatttcttaaggcaaatcctgtgaagttatggaatttgttacgggccctggtccataatggtggcagccacgagaggacgtgatttgcgtgagtaacacccacaaagggaaccacgttgcacagcacagcagatgcccaccattccggcagttatctgtatttgggaagggggaggttgtatgatacagagaggaagagggaatttggctggggaggccaccaaaccaagacaggcagttggacatgggcagggctcctgctgagggaactaagacagttcctaaaactgcctgagctctatgcagagccacccgcagcaggaggtataggacacaggtctgacatgcctataactgagaggaaagagataggcaataaccattaaatcaggctgggcacagtggcttatgcctataatcccagcactttgggaggccaagatgagtggatcacctgaggtcgggagttcgagaccagcctggccaacatggtgaaaccccgtctctattaaaagtgcaaaaattagccaggcacggtgacgggtgcctgtaatcccagctactcaggaagctgaggcaggaaaatcgcttgcacccaggaggtggaggtagcaatgaaccaagatcacaccattgcactccagcctgggggaaaagagcaaatctccatctcaaaaagaaaaaaacagaaacaaatcactttttaaacctattactagcaaaacatttaaaaacagaagctagaagtatgtgttgacacaatagcacattttatcagcccttattatgaaaattctgtgtcaattcccgtccacctgactttgaagttatcagcatgtgtagcaaaagtgaatatgtttcatggcctctttcccatgaacgtattcacattttatgaaataataaaattcgcataaagattacatcataaactccagtctccattttcccctcttcattgtatgcgacatacgcacgttccctgaaaataaaatgtgcgtgtaaaattaactggctattttaggttgagttcccagtgtacctatttggaatgcctttccaagtcaaaacaggttttgaggctgtaacaatagcatcacaaataaaacaagttggattcagagttttacctaaagtaattgggagtaaaaaaggaattgttcaaggttccccactatatcttcatacttcctttcgctggctcttgatttacttagagatgcagttaagatggaaatgagccatgcccagagggatggagaaggcagagtgagtgagttccggtgttgcttttatgaaccacgcaagtgctctttgcagaaacctggtccggaagccttcccccgtgtaggtgcggagaggagaaattgctcacagtctgaaggaatagcatgcacaagaacacattttcaaggggttctgctttcaaaactccacctttcgggaaaaatgtaaaaggtgctttgagatgaccttcactcttgtttattcccaatactccctcctccatccgtttcaatcattgcagctcagaactgcgttatgacagcagcctgaagaggaacccaggcctgccttataggacacccagcccatggcctgctcaatgaaaatacctggtaaaatgggcagcatggttctatgctaatgaaagctcgtgcccttaagtggctttctgtccctcatgtgggctgggtggcctgtctcccactgcgtgaagcctacagctctttacactgcccaactctgtttcttggtttagtttgactctgcagctacccttgggcatgccctggagtccggcagcctgggggtgctatgccatgtccaggctgcctcgtgtttaccatgatccccttggctgctttctttctttcattctaaatctcctggaagtttccagaagaaaagactgccaacttctcaccttggcaccctttctacctcttctgtttttgcattttacttttactttcaatatgcctctgcatctgtttagtaacaactaaaaagttttcctagctaggttatgactatctcaggctttgaagctctgttcttcttaccagccacatggttagggctgcctaactaacctttctgtgcctcagtttttttcatctggaagatggggatcccataataacattcgcctcctgtagggttgttgtgacaattaagtgagttttcacacaaataaggtttagagctgcacctggccatttgcaggtgctgagtgttagctgtagtttctttttctacacccccaactgttctgaaagacggtaagggctgtgagccctgacttggccgttatcagcaattttgacaatattgcattctttttccatggaaaaaactcgaataactcttacagatgagtttcaaagtcaatacaagatcatcactgtattctacagttccagacttgggtgcagtattggtgcctaagctggccaatttcctagccattggaggtgtgagtctcacggcactactttaatactttgatgctgagatgccaatagagaaagaaaatattgaaaagttgagaaactgattctgaatttggtttttatattttgataaaaatgaagagaaactaaaagaatttaaggagaccagtcttttaagaaatgttcaagtctactttttgttttgtctagggaagaaatgaagaccagttatacagcaactcccttttgtttttaggaagataattggatataattttgagaatgttccttggtttaacctcggggaagagttcagtgttattgttaaagaaaaaaaaatgacctttgataaggcagtaaggcagactttattcagagccatagagaccctgcaattgcattttgaagtgggcgagagagattgggcacaattccaaatacaaaaaacaaatgggagtttatagccaggtagtgaggtggggatcagtggatggaatattatttacaggagacatcaagggtaaggggcattctggctacatcacctgaacatgactcttgctgaacacagaccagggtgatcagacaaccacctgggggttggtgaaggagaaacctgatcagatagttagggtgatcagatacccaggatagccaaactaagcaggattcttgctaaaactggagaaggcagagacaagaaaaaatgctccaaagtcagggcttagttgagaagagcttagagaggggcctgcctaaagtctggtcagggaaagagtctgtcgtgatacacagttaagcacaagactcttggcagatgctatgagatccacctctccagggatggttgaaggaggctggcttggatttgggactctctgaaagggctctcactgtgaagacagcaggatgctgacaatacccacctgtgtccaccacagcatgcaggcctcatctacttctccacccacctgtgtctgccacagcatgcaggcctcatctccttctccccatgggtgcagcacagctggccagctttgaggttggggtcatctgtgggtctctgaccagagctcccacattccctaaatggaaaatgaaacctgagaattttctgtgctgcaccatctttgctagaatacttggctcaggaccaactatcaagaatatgagagaacaagtagtgtatcacagagatgtaagtgtcaatccttgttctggaatgttccctgcagtggggattcagcacagatcatggccacttatagccttgggaagtgagagcagagggttggggaagggcccccatgagcctttcaggtctagactctagtggattaataggagcagacatccccagctgccctctagagatagttctaatattttagtcaccatactacttcaccctgacatcaaaggacgtcttcaatatgcatctctttgataatctcccctcttgggtgaatttcagcctgtctcaattgggcctccaccttccttttcaaagaaaatgccttgttttttcctcttgttctataagatcttccatacccctatgctatatccgaggtctggtgctcaacttctgttctcagtaactactggcttttgtttctaactttcactacaattacaatcaacgcaagctttgggaagcctgcttttaccttgaagcacttccacatcaggaggtctgagtgcagaggtgctccttacaacagatggattgctgcacttaccggggaaaggccatcctgtgatgttcaccaaaactaacaaacacctggaaatgggaattgtgtttaatgaaaataaactgaagctggcttcgttcattatacccaaaatattagccatctctaatcttttcctcacaggttatgccctgcaggaattactgggagggatagagaagaatgctttcggttagtgaaagacaagctgtaattgttgggagcactggatgagaaaatgcacataaaatcacttggaaacttggattagcatgcaggacagataggttctgaagctcttcccagaattatcacactgcagcccctcagggtgggggtggggggaggggtgtcaccgtaaggtaatgaggcaggtgggaaggccacctgtcttggctcagagccactggggtgccatctgggtgcaattcaggcagggggtgactggccacctgtcctggctcagagccactggggtgcaatctgggtgcagttcaggcaggggtgaccatgttttctttaatgaagttatagcctatgctatgtgaaatacctggatgattccctaaaatcgactttaacagtgtttgcctatattagtcaactttagagtgttttataagtagttttccacttaatcacattcattattcttgattttttttctttttgtccctgtcactgaacatttgcatatgtagacaaaataaaatgctgtatatctcatagtgaaaccatgtaacatgcacacacgcacacacacacagggagagagagaaagagagaaaatggtgagccatgtatcaatgatcataactgactaaactggcaatgttaaactactgcgggttctacctctcaaagatcctgaatgtcacaggtggcaccatccgtagaaatggtaattcatcccgtcaattagctgtgatgctcaggaccaaatgttagcaaggctgggattaatagcaagtgatcatttgcatctggcattcaattgggagctgccatgagatgctcccaccctggggtctctgttctaaatatacgacaggctgatactttgcaggaaggttcattctcaaacataaatagcacacatggtctttgcattttgcctcccatcctagctggagaagcttattttgtatgtcatcctaaaggtcaactttctcacgctaaaaaagaaaatgggcatcaggcgaaggtgcagggagcgcagagaatgctcagtgcagcagctggtggttgtcctgtacctgcttcgtgcttgtctgtgtgttttgcccaaagtgatgtgggcccgaagttactgccaggatctgtctgtgccctagttttgcccaattctcacgtcaccaattctacgacccttatttcagattgaaattttttcatgtgagacccactacctgaagaaggcaaccctgcttacttactctagtaggaaaaggaatgctggttttctcagagtgaaactatttaaaatcttaccccttatttttccaaacacacccctcccacagtgctcctaacatgttttagttgacaattaaacgtctttgtgaattagtttttttgttccctgttccacatttcccctacccataaggcttacgtatttcctgtaaagcaagtacccttcttttaaaacaaagaaccatgaaattaagaaaggttttttggctggacacggtggctcatgcctgtaatcccaccactttgggaggccaaggcgggtggatcacctgaggtcaggagttcgagatcagcctggccaacatggtgaaaccccgtctttactaaaaatataaaaattaggcatggtggcatgcacctgtaattccagctacttgggaagctgaggcaggagaatcacttgaacctgggaggcggaggttgcagtgagctgagattgcaccactgcactccagactgaacaacagaaagagaccctgcctcaaaaaaaaaaaaaaagttgtttttttttttttttttttggaattgttgttttgtctttttaaaaacattagtgatggtgaccaaaacttggaacttggaagctgtcagttgggtgaggctttccaggctgtgttttctccatctgatgctcttctagcaagcattttctttcagtaaaactcccaggggaaaagaatgtgaaataactactttgtaaatgataccaagcctcaatgttaatgttcagtattgatattgaatgtctctcagcattttagttagttatgtgtcatcttcccttaggtttaagaatgtcatatatcagctatcctgttaaggatatgtatttaatcctttgaaaatatatatatatatacacacataccaaatacatataaaattgaaaggctctgttttatatttttatgtatggggaaaatggggagaatttcaacttactttgtaatcgggtcctaacagttcatgatttttaataagtagcaatcttaccagcagtgctttcccaccgtagatttaattagtctttcttcccccacccccaaccccttttgctagttgacggagctgagaggagggaaacggccgcaatttgaaaccttgttagaaatttatgaagtgctaaaatgttttattcccagaggctggcttgccagctgtcacgagctccctgcctgcctccgcggctgtgatagcaggggtaagagggaggctgccagagctgcacagggtggggaaatgccattcccatcagcagcacagggcggaggtcagctcctcgttctcctgcagctgaccagccacatgtgagatgagaattcaggggatctggagcgggcatcggagccctagagtaagaccctttgcggctgttgataacaggcactgatcgctgatcatgcaatgagacgtcagctttggttatagaaattaaacaaccattctgttggtggcctcaaacagataattggcctcttactagcaaaatgtccctgaactaattttttctggaggaaacaccttctcacaaatgttaccaggtgtgaaggatgttcttcccggggtcatagcctacctgcaatgactctctgtgtccccatccctcccccattgcttctatgatgcctggaatgtgtctctcaggaaacaaagtttaaaaaaattttttttctttggtccttgaatggaaatatcacttgcacactgtggtcatagataccccagagaataaacaattcataataaaggtgcaaatcacccacgttagatgctgagctggaggaagtgctaagtctgacatgatggagaccaaaaggccccacggaagcagaggaggaggaggaagtgcctcctccagggccaggggctgggccaggcagtgccttcatgatttgcctccaagttgctctgcgcaaggaattgggcatggaagaaggagccagagacctcagaaatcttcatggcaatgacattggttaggaaagtatgccctcagcaccctctcctacttcctctgcctctccaaaccaacaattatagtaagtacttttggttccacagaactttctgacaagttctttttttttttttctgtgatacatgtgcagaatgtgcaggtttgttacataggtacacatgtgccatggtggtttgctgcacctatcaacccatctcggttttaagccctgcatgcattgggcatttttcctaatgctctccctctccttgccctccaccccctgacaggccccggtgtgtgatgttcccctctctgtgcccctgtgttctcattgttcaactcccacttgtgagtgagaacatgtggtgtttggttttctgttcctgtgttagtttgctgaggatgatggtttccagcttcatccatgaccttgcaaaggacatgaactcattcatttttatggctgcatagtattccatggtgtatatgtgccatattttctttatccagtctatcattgatgggtatttgggttggttccaagtctttgctattgtaaataatgcagcaataaacatacatgtgcatgtgtctttatagtagaatgatttctaatcctttgggtatatacccagtaatgggattgctgggtcaaatggtgtttctggttctagatccttgaggaatcgccacactgtcttccataatggttgaactaatttacactcccaccaacagtgtgaaagtgttcctatttctctgcatcctcaccagcgtctgttgtttccagacttcttaatgatcaccattctaactggcttgagatggtatctcattgtgattttgatttgcatttctctaatgaccagtgatgatgagctttttttcatttttttttttttttggcggcataaatatcttcttttgagaagtgtctgctaatatacttgacccactttttgatggagttgtttgtttttttcttgtaaatttgtttaagttccctgtagatcctggatattagccctttgtcggatgggtagattgcaaaaaatttctcccattctgtaggttgcctgttcactctgataatagtttcttttgctgagctgaagctctttagttaattagattccatttgtcaattttggcttttgttgccattgcttttggtgttttactcatgaagtctttgcccatgccaatgtcctgaatgatattgcctaggttttcttttagggtttttatggttttaggttttacatgtaagtctttaatccatcttgagttaatttttatataaggtttaaggaaggagtccagtttcagttttctgcatatggctagccagttttcccagcaccatttattaaatagggaatcctttccccattgcttgttcttgtcacgttttccaaagatcagatggttgtagatgtgtgctgttatttctgaggcctctgttctgttccattggtctatatatctgttttgataccagaaccatgctgttttggttatggtagacttgtagtatattttgaaggcaggtagcatgatgcctccagctttgttctttttgtttagagttgtcttggctacacaggctcttttttgattccgtatgaaatttaaagtagttttctctagttctgtgaagaaagtcaatgttagcttgatgagaatagcatttaatctataaattattttgggcagtattgccattttcataatattgattcttcctatccatgagcatggaatgtttttccatttgtttgtgtcccctcttttttctttgagcagtggtttgtagttctccttgaagaggtcttatcgcatcccttgtaagttgtaattccaggtattttattctctttgtagcaattgtgaatgggagttcactcatgatttagttctctgcttgtctattattggtgtataggagtgcttgtgatttttacacattgattttgtatcctgagactttgttgaagttgtttatcagcttaaggagttttagggctgagatgatggggttttctaaatatacaatcatgtcgtctgcacacagagacaatctgacttcctctcttcctatttgaatgccctttatttatttctcttgcttgattgctctggccagaacttccaatgctatgttgaatagcagtggtgagagagggcatccttgtcttgtgccagttttcaaagggaacgcttccagcttttgcccattcagtatgatattggctatgggtttgtcataaacagctcttattattttgagatatgttccatcaagacctagtttattgagagtttttagcatgaaggtgttttgaattttatcagtccttttctgcatctgttgagataatcatgtattttttgtcattggttctgtttattgatttgtgtatgttgaatctgccttgcatcccagggatgaagctgacttgatcatggtggataagctttttgatgtgctgctggattcggtttgccagtattttactgaggatttttgcatcgatgttcatcagggatatcggcctgaaattttcttttcttgttgtgtctctgccaggttttggaatcaggatgatgctggcctcataaaatgagttagggaggagtccctttttttctattgtttgaaataatttcagaaggaacagtatcagctcctctttgtacctctggtagaatttggctgtgaatccgtctggtcctgggcttttttggttggtagactattgatttactgcctcaatttcagaacttgttattggtctattcagggattcatcttcttccttgtttagtcttgggagggtgtatgtgtccaggaatttgtccatttcttctagactttctagtttatgtgtgtagaggtgtttatagtattctcttatggtagtttgtatttctgtgggatcagtggtgatatcccctttatcatttttttattgtgtctatttgattctcctctcttttcttctttattagtctatctagtggtctatctattttgttaatcttttcaaaaaaccagctcctggattcattaattttttgaaggtgttttcatgtgtctaactccttcagttctgctctgatcttagttatttcttgtcttctgctaggttttgaattcgtttgctcttgcttctctagtttctttaactgtgatgttagggtgttgattttacttctttcccactttctgatgtaggcatttagtgctatacatttccctgtaaacactgccttagctgtgttccagatattctggtacactgtatctttgttctcatgggtttcaaagaacttggttatttctgccttaattttgttatttacccagtagtcattcaggagcaggttgttcagtttgcatgtagttgtgcggttttgatgctctacatgtttagagaaacttctctagtaatgaactatagaaatgatccctgaaagtactcttctgataagttcttttttaaaaaagtaaacgtaccagggcactctctaattgggatcgtttctctctgtattagtttgttagggctgttaagaaagcatcacaaactgagaggcttgaacaagagaagtttgctctgtcttgcagttctgtaggctccaagtccaagatgaaggtgtcaacagggttgttttttttctgagagctgtgagggaaagatctgttccagtcctctctccttagctggtggatgtctgtattcatgatcacatgatgttctccctgtagtacacatctgtgttcaaatataagatgagagatggaggggtggaggagagaaaaaaagagggagggcgggagggagagagagagagatgctatgttgttggctttgaaaatagagggggggccatgagccaggaaatacatgtagattctagaagctagaaaagataaggaaacagactctctcctaaaaacatttgataacaggtaccgagctgggagacttggagcagataagagctgtacttagatttagcaaaactgcatcttcgtgatgagccagactcaaggatgataaagtccactacttggaaggatcatggatgcagccttgggtttaacttgaagtcattcactgagttcagataccagactgactctttccataaggaattgcctggttaggtgagggtagaaattcaacaatgactgttgcattccagaagaaggaaggcaaagagccaaactccaagttgtgctttgggaatgttgtgattataagtaagtgcatcagctccaggctccccagtgtcacatgcacacactatggggactgatcgtgttgattctcagtgaggtgtcttggggaccctgtcccagctgggaaggtagggatgtattagaaggcttggtgccaggtgcagaaaggggaagattctggaggccaggcacagtccatgagctgtagccagagatatggcatgagaataacatctaacttcccagaaaaacagcacagccaagccaggcatcagtcaaggatcacaggaggagagatttgcaggaaagcaaggttcctctacctgggtggcaaaatgccacagctgctgaggcttccttgactcttgcctgcttgaaactggcaaagcagtgactgctggtggctatgaatgcttgttaaatggcccattcttactccctgactggcctgtgcccaggacctctgcagttggatagaaagacagtgtctctagggtaaggcaggtcagaatcaaacacaaattccactcagtatgacctgtggctcctgtgcaagctaacgtcaccctctcagcctcagtttcatgatgtaaaaaacaggaggaattctgaaatatttgaagcagctgtgaagcaagggccaattgaatcaataaatgtgaatgtggctgggcgtagtggctcctgcctttaatcccagcactttgggaggccatggtgggcagatcatgaggtcaagagattgagacaatcctggccaacgtggtgaaaccccgtctctctctactaaaaacaataaaaatgaaaaaaaatttcaaaaattagctgggtgtggtggcatgcacctgtagtcccagctactcgggaggctgaggctgaagagttgcttgaacctggggggtggaggttgcagtgagccaagatcctgccactgcattccagcctggttgcagagcaagactctgtctcataaataaataaataaataaataaataaataaataaataaataaataaataaatgtaaacgtatccaatacagctcctgattcttcatggaggcaaaaagatgaatgcccctctcgtcacctcccccttttgatgtgtggagggcgatggctgcattttcatctgggacagtgatggagatagaaggcggcagtgaggaaggaaaaggagggaagcaaagactggcaccccaggctgtgcaatgactgctgccaggggcaggctcatgggatgatggcaggagggatggggagctggctttgaagtcctggactgaagccagaatggttctcatgctcccgtagcaagtgctccgaggccagccccagcaatcaacccaactgagggcagcacagaagagtctggacagcccactccccgccgtattgatgtgcataattagcctgcaggtgcaccttgactgggggacagagagataggcaggccagctggcaggctgcccccagggatatgggtatttatccatgatcagaagggcacaagcgagtcacgtgcactttaaagatcattcagttggtttttttattcaggcttaaaaagatgtaatccagcctgaaaagattccaggggcaatgaggaattcaaagcagagccggctattaggtgaccatgatgcttggagaatgtgggggcaaggaggagtcctgatgcatggggtcatggagagtggtgggagtgagatgggcactcaggataggcttggagcacgtgggaggctgagagcctggggactgtggaatccaacctggaatcctcttggatggactgggagactcaatgccaagagatgagacaggatgggactaagagcaaaggccccaggctgggaggagctatgtgtcccttctctctacccttctctccctctcctttttgtgcctcctcactaccccatttcacaccccttccaggcagccttgtgcagtccggatccctgtactctaaggattgtcacaagcatacttgcgttctttatttatgatgatctattaacaagaataaatggttgtgggtcagataaagggctaaaaatcaaaagtcatccttaacatctttaagatgctactatgtatcatctgtcagggcatgagggtcttcatcaggcccactaaagaatcccatttctcttgaaccaagtgtgtcatgactgggaggaagacaagaccatttggggtgtgaagttttgggctagaggcccttttaggagccaggttagcccccagcttccccaagaaaccaagctgcccccctcatcctcgcctaagcaagcagctgatgacaaaaccggagttggcctgaggggttcaaaggaaaaccataaatagaccccccaaaataagaaaatcatgtaactaaattctttccactttatgccagcagtcaccacacctcctgtcctctgtatctcagttttaggtctttttttttttttttttgagacagagtcttgctctgtcgcccaggctggagtgcagtggcaccacctcggctcactgcaagctccgtctcccgggttcacgccattctcctgcctcagcctcccaagtagctgggactacaggcgcctgccacagttttaggtctttattctgtgttcctctttatttttttcccagtccctttttctgcatctctcagaatatacactaatgtcctaggacagccgtaacaaagtgccacacattgggtggcctaaaacaggaggaatttattttgccatagttctagaggccagaagtctaaagtcaaggtgtgagcacggtggtctccctctgaagctcctggtgggagtctgcttcgcctctctctgtggctgctggtggctgccttctcagtccctgttgtcatatctatcataccgtgttctccctgtgggtctgtgtctgcctctctgggtctttgtccagattttcctcttcttataagaaaaccagtcattgaattagagatcattgtaatccagtatgacctcatcttaatttgatgacatctacaaagttcttatttccaaataaggtcacatccacgggtactgggtgttaggacttgaacttaccttttagggggacacgattctgtccactgtgatggatatacgtgtattcccccacatgaaacagtactccacacatagggaggattcaatcgagacttgatgccaaaacttagtggcccaaagtggcaaacatttatgatttctcatgattctgtgggggcagctgtgcagctcttctagtaaggagaggcactctcttgattctcttaagtgtctgggcttcaaatcggatggcaggcacaactgggcctcagcacatgctctttaccctctggtggactagcctagcctagtactcgggtggtggacccatgtcccaggaagccacaatgctcatgcccttcccaactgcttgcatcacatctggcaatattcctgtgactaaagcaagttgcatggccaactccagattgaaggagtagagaagtcaggggagcagccaagtcacgttgcacaggacatgcatgaggaatgagagaatttgttgcagccattttttgcaaatagtctaccatagaagctgagtgacatgaccttttatatatgtggaagagtaacaatatatacacatgggctgggcacgatggcttacgcctgtaatcccagcactttgggaggccgagacgggtggatcacgaggtcaggagatcgagaccatcttggctaacatggtgaaaccccgtctctactaaaaatacaaaaaaaattagccgggcttggtggtgggcacctgtagtcccagctacttgggaggctaagcaggagaatggtgtgaaccccggaggtggagcttgcagtgagccgagatcatgccactgcactccagcctgggcaacagagcaagactccatctcaaaaaaataaaataaaaataaaaataaaatacacacacatacacacacacacacacacacacacacgaccatttgttgggcaatctttcttacaggctgaattgtaaatattccagagataaatcgcacagacttgggagttatatcgtctggcttgcaatactacctctaagatgtgcaaactgtatggcctttgaccaacctttctgtgcctcagcttcctcatttataaaacaagaataataatacctccctcctatggctgtgagttgtaggataaaagaagttaaaatatgaagtgtttagtacagtgtatttgtctattcttgcattgccataaagaaatgcctgggctgcgcgtggtggctcatgcctgtaatcccagcactttgggaggccgagatgggtggatcacttgaggtcagaaactcaagaccagcctgaccaacatgatgaaaccccatctgtgctaaaaatacaaaaattagctgggcattgtggcaggagcctgtaatcccagctacttgggaggctgaggcaggacaatcacttgaacctgggaggcagagattgcaatgaaccgagatcatgccaatgcactccagctagggtgacagagcaaaactctaactcaaacaaaaaaaaagagactgagtaatttataaagaaaagaggtttaattggctcactgttctgtaggctgtacaagaagcataatactggcatctgctcagcttctggggaggctgcaggaagcttagaatcatggcagaaggcaaagagggagcaggcagctcctatggccagagcgggaggaagagaggggggaggtgccacaaactttcaaataaccagatctcacaagaactcactcattatcgtgacagtaccaggaggatggcactaaaccattcatgagaaatccacccccatgattcagtcacctcccaccagaccccaccttcaacattggaaatgacatttcaacataagtttttggcagggccacatatccaaaccgtatcatacagtgacatgcataaagcaattactaaataagtgctatctgttttaatttaattcccaacttcttgcatcagatctgccaatattcctgtaactaaagccagttgcatggcgaacaccagattctaggagtagagaagtcaggggagcagcaaagtcacattgcaaaggacatgcatgaaggatgacagaatttattgcagccattttttgcaaatagtctgccatagaagctatatgaatatctcatttcaagatgtatgagcatctcattttgctcttaaattcacatcagtaaactttggaatcccctacacaactcgcctataccttggggggccagggtgctacctcagtcctgctctctgccttatctttttattgcagcattttcactctgctgtggcctctcagggtaggggagaccttccctttccttttctccactcctaccaatccagagtttctatcatctaaaccatacccaccctcaaatctaagattcctctcaagaatccaggcaacatctttttaaaaacttttttattttttatttattttttagcaggtggggacagagcctttttatgtcacccaggctgaaatgcaatgacatgatctcagctcactgcaaactctgcctcccgggttcaagcaattctactgcctcagccttctaagtagctgggattataggcatgcaccaccacgcccagctaatttttgtatttttagtagagacagtgtttcaccatgttggccaggctggccttgaactcctgacctcatgatccgcccacctctgcctcccaaagtgctgggattacaggcatgagccaccgtaactggaccctaggcaacatcttaacctcatccttatcccccaaatctctccatgtcctgcccactgcatcatctcccttcctcttccatgttgtgggaactctgtcctgagccatattctaagtcttcacaccatgtcttgtggcaaaactccatcattagacctccaagctttgttctgccttaatgcagaaggaggctttgggaatttagaaaactctcttccctctcaattgtcctataaatccagactttcaaatgaaatgcttaccatagacttgagaaacaaatcagaaactcagagcaaaaccctgagtctttattttaggctgtatctttctttgaagcaatggctgccatcaactccgtgtgtgaaggagacacaggacaattaagaaacaaaaatgagcggtggtgttgcaggtgctgttggtgcctgcctggagcctgtcacctccttaccatttcctggcagcacttccagctgcccagtagcaacacttcccctaaggactctctttggcaggtgaaagtgcctgagattgactcctgagagcagccacggccagtgacagccggaggtggtgatgtaaacctcagctagctaggctttcaggaagagtaactgaggcagggtcctgctctggttctcagtgtctccaagagatgaagctgccatttctcatagtggcgacttgctataatgtgcccttcattgaccgtcttccttttattgttcacttgcctcctttcctgcctgtgtttcctgaaaccaactacctcacataaactacttttgcttgaatccctgtcacagagtctccttctgggggattctgaaggtagacacatttaatatgtcaaaagtattgcacctgttgtgtgttttaggggagtgatgattagcagaaaatagaaaggaggctattatagtggtcctgggcatgggagaacaagagcaggtgctgataaaatcaggagaacttgaatagtggcagagctggcagaaacacggaggatgtgtcggagggtctggtgtgcggttgctccccacagcggagtctgagcaagaaaagaggctctggcctgatggcaagaagacctcacggctgtttcttgccattgctgtcactgtcatgttcataggttcactgcccatagcaactgaaagaatgtcaaatgcttgcacaacccccttcaatttgtagatgaaaactggaagtgtggacaggttaagtggaagctcaaggtcataaagccagccagctgcagaaccttgcactgtaagtttttgttcgtgacaaggcccagctccacttcaggtgcggttcagatttttgtcttcattcgttctataaaacttcattttttgctttttacttctcgactcttctaattgtcctttgtatgtctattaggtgtgggtcccccattaggctgatctgtagcataatttctacaataggaaagggagataaataggacatttaagatgcctggactcatctaaaggttgtttaaaagcaattactaccattagtttgaagcctacctctggctactctgatagtaatgtgcacccagcaatccaattagtttggaaatggattagtctatttgttaccaatgtgtgtggtttaaaatcagtataatatacatctaaaggtgtgtccattttatctattgacactttgtataaatgtgttgcttcatctttccgtaggtaatttactcactcccttctcccatactaaatgtttcttcattacaaattgatttcctaaactatgattcatgatgtttcagtttcattgtctttattaaatgactgtaattctttctttagttttaaggatttccattttgtgtcaccacattggactaaccatggacaaccagattttccatagaatgaggtcattttctgggaactaacagaccaaggaataccccctgatatactacattggaggaatccttgcagatactctctccaaatgtgttaaataaataaaatagtatgttcatcaagtacctctggggtaccagaagcacagataagctggtgtccaacatggagcaagtctggcattgaggtgttagaagaaaaaggctgggctccctgaactctgttacatggtggaggctgaggggcctgttgtgtagattcaggtgcaggccacgtgacagggtgttagccatgtaagtccatattttctcccattgcttcacatctatttcatctattacttcattcattcaacaaatgcttagtgtctattatttaaacgtttctggggatatactagtgaacaaaacacttgcctttcctccttgcttccctcttctccccttctctcctcctttccttccttttgtaattctttactccccgctttttaaaattgagcttattttcagggcttcctttgaacatctgcattcttatccagttttggaacactatttgtgttgttgttgttctgttggacagggtctttctccgatgcccaggctggagtacagtgatgtaatcatggctccctgtgacctcaaactcctgggctcaggtgctcctctcgcctcagccttctcagtatctaggattacaaacacaagtccctgcacccaatctataaaagtatttttttaaataactgcatattttatcacatattgcctcaaatcttgttggtcctcttgccaaattgtcagatattagtggagacacaggtcagtttcccaaggaaaagcattaaacgtggtccctgcctcttgctgcagcatttggctgcaggaatgtgtgtggattccaagccagagggagggccccacctcattaagccgacctaggggagggccccagctgtgctcagtcaggaggaagaggtgagctggctttggagaaaagaagaggttacagcagaaaggaagcacccattcttgacagagtcttagggagccttctctcctttctggatacaaagcttcacactataataaaaccatgtggcttatgtagttaattggtagattattattaccatgtacaaagtgctgtcaggagtgcaaaagaaaagatgacctgcactttattcttgttttgactcttcttggagttttgtctattgggatgtttgccatccagttgggctatagagctaacaatgaatagtgtgaatttgctgcacagtgagctggtaatgcagcagataagcagaacagaggcatcagatcagtggccgaggagatggggatggggtcatttatattatgaatattggattacaaggaggtgatgcactctgcttgcttcaatgattttttaaatgtaactttgtctttttttgtcttttaaaaatgtaacttaattttttttacacaaaatataaacatgaatagaaccccacttaagaaatagaaaagtgtccttgaaaaggcccctgtgtgctcctctccaatcacgtccccaccccaccctacagtaggaacccctctcctgaactccttgttaactaatcctcaatgttctttgtagttgtaccacatgtttgtagccttaagtaatattttgctaagatgtgcatgctcttgaactttatgtaattagaatcacagaggaagagttcttctgggactagctttgttctccacattattgctttgagatttatccatggtgatgtgtgtagtttgttcatttattcaacaaataaattttggaggcaaatactgagtgccacacatggtttctggctgctggggatacagtgtgaacaaaacaggcggaagccttcatcttaaggtagctttattctagtgggtgtgggagagcaatgcatcagataaatgaatatgtagactagtagattgtaattagtgcaaagaaactgaagcagtgaagaagagtaattttaagggagacgtggagtttcagataggctagagtcggtctcgctgagaaggggcacttgagtgaaacctaaacgaagtgatagagtcctggggatgtcagcgggggtggaagagggcttttcaggcagagcaaacagcaaacaccaaggcctgcagcagcctgtgtgacaagagcagggttagcaagggagggacaggaaggggagatagggacagagaggatgttggaggtttttgaacagggtggcattatatgacttatgctttaacaagatttatctggctattgtgttgagcatagagctgaaggggcatggggactggagcgagggctccaggtgggagtcattttagtcattctaacgagagatggtgtggacatggggaaaggagcagcgtgctgggtgcatcacaaaggctgagtgtaggattttctgataggttggatttgaggtgacagaaaaagtgagaaatcaaggactgtagcctgagcagttagaatggcagagggactgctcatcgagtgagggaaacagggcagggaaggaagatcaggggctcagtaaaaagaatgttcggtttctgatgcaaattcaacatcctggtgcagatgtgagcaggcagttgggtgtagaagtttggagtttagataagaggtctggatcagacatggaaattttgttgctgccagcctggagatgatactaaaaaccttcagaacgggtgagatcaaagggagaaagggagtgagtacaaagagactgggaaagaaagaaagtccagagactgtgttctgggatccttcaaaacgtagaaatcaggaagtaggaaccagcaacagagacttagaaaaagcagcaagaaaattcctatcagagggaaaccatgcatgatcaatagtgtcaattatcactgctacagcaaaacacaggccactggtgactgcaagagcatgttcagtggagtggaggggacaaaagccagcttaaaatgagagactaggaggctgagggagaaagtggagccaatgaggtcaggcatggtggctcatgcctgtaatcccagcacattgggaggctgagatgggtggatcacctcaggttgggagtttgagaccagcctggccaacatggtgaaactccatctctgctaaatatataaaaattagctgggtgtggtggcgggcacctgtaatcgcagctactcaggaggctgaggcaggagaatcacttgaacccaggaggtagaggatccagtgagctgagatcacaccactgcactccagcctgggtaacatgtctcaaaaaaggaaaaaaaaaaagaagaagaaagtggagccaatgaaggattagaggggagaggctacgtgggagaaataacaaggtttcagacagttacaggccgccctttatacattcctctgtaggtgcacatttaagtcagttccatctctcagcttctgtgaacagcgctgcagtaaacatggagtacagacatcccttcaacacactgatttcatttcctttagatctatatccagtaatgggactgctggctcatatgctatttctatttttaaatttttgaggatctttcatgcctctttccataatggctatacttatttacattctcaccaacagcgtggaagagctctcttttctccacatcctcaccagcatttgttaaattttttgtgtgtttttgatgataaccattctaaggtgaagggatatctcattgtggttttgatttgcatttccctgatgattagtgatgttgagcattttttcatatagctgttggccatttgtatgtcttcctttgaaaaatatctattcagatcttttgtccatttttaaatttaattatttgcttttttgatattgagttgtttgagttccttatatattatggatattaatcccttgtcagatgcatagtgcacaaatagttttttttccccattctgtaagttgtctcttcaatctgttatttcctttgctgtgcaaaagatttttaatttgatataattccatttgtctatttttgctcttgttgtctgtgcttttgaggttgtctttaaagaatccttgctccattccatgaagcatttcctctatgttttcttctagtagtttcatagttatggtcctaacacttaagcctctgatcttatttgagttgatttttgaatatggagatagtgatctagttacattcttctgcatgtggatatccagtttccgaggaccgtttattgaggatactgtcctttccccaatgagtacttctggtgcctttgttaaaaatcatttggatatacatacatatatttatttctaggttctgtattttgtcacattcatcaatgtatctgtttttacgccagtgtcatcctgttttggttactatagctatgcagtatattttcatcaggtagagtgatgcctgaagctttgttctttttgctgaagattcctttagctctccaggatcttttgcatttccatatgaattttaggattgttatttctattgcagtgaagaatgtcattgagatttttattatagagattgcattaaatctgtagatcactttggataatatgtatatttttaaacattatttcagtccatgaacatggaatatctttctaattttttgtgtcctcttcgatttctttcattggcgttttatagttttcattgtagggatttttcacctccttggttaagtttatttataggcattttatttataccttgtaactattgtacatggaattactttttcaatttcaatttcaaatagtttgctattggcatatagcaaacactactgatttttatatgttaattttatatcctacacctttaccaaattcatttattagttctaatattttttttttgatggagtctttaggcttttctctaaccatctatctaattatgatgatattgtctgcaaacagggaaaatttgactccctcttttcttaatttggatgccttttctttctttcccttgcctaattactctggacagaatcttcagtgctatgttgaacaaaagtggtgaatgtgggcatttttgtcttgttctacatcttagaaatgaagttttcaactgtttcctgctcagtatgatgttctctgtggatttgtcatatatggcctttattaaattaaggtgtgttgtttttataaccaatttctggaggatttttatgaaggaattgaattttatcaaatttttttcagcatctattgaaattatcatatggatttggccttgattctgttaatgtggtaatattatgtttattgatttgtgtatgttgaatcattcttgcatctctgtgatgaatcccacttgatcatggtgaattatctttttaatatattattgaattcagtttggtactattttcttgaggattttttgcatctgtattcatcaggaatattggcctatagcttccttttttgttgttgtattcttttctgatttttggatcagggtaatgctggcctcatagaatgagtttggaagtgttccctccttgtcaattttttggaagaattggtagaattcttgtgagaaagattagttgtaaatcttctttaaatgtttggtagaatttatcagtgataccattaagtcttgggagttttttgaatgggagattctttagtactgcctcaatatggttattcattattggtctattaagattttctatttcttcatgatttaatcttgctaggttgtgtctgtccaaaatttactcatttcttctagattttccaatttcttggcatatagaaatttacaataggctcttatggtcctttaaatttttgtagtatcagttttaatgtttcctttttcatccctgattttatttatttgagtcctttctctttttccttagtctagcttaaggtttgttgttttttttttatttaaacaaaaatacctccttgttttcttgatcttttgtattgtttttaaaacctctattttgtttatttctgctctgatttttgttatttttccccttctaatttggggttcagtttgtccttcttttctaatttcttgagttgtgacattggattttttatttgagatctctctacattttggatgtaggcatttatcacagtaaaattccctcttagaactgcttttactatatcccataggttttggtatgttgtgtgcatattttcatttgatcgagaaatttttaaattttatttttgatttcttcactaactcctctgttgctcaggagcgtgttgcttaatttccatgaagttttacagttttgaacatttcttctgttattgatttttagttttattccatggtggtcagaaaagacacatatgattttgatttttaaaaaatttctaagacttgttttgtgactttcataatctatcctggagaaaatatcatgtcttgttgagaaaaatgtgtattctgaatctattgggtggaaagttctgtaaatgtctgttggattcatttgatctagaaggctgtttaaatccaacgtctctttgttggttttctgtctggataacctttccattgctgaaagtaggggtattaaagttccctactcttattgtattatagtcaatctacagacctttcagatctattaatgttttccttacatatttgagggtctcaaatattgagagtcccagttttgggtgcatacatatttacaattgtaatgttctctttctgtattgatccctttgtcattatatcatggtctttttgtttattttttaccattcttgacctaaagtctattttatctgatataaatattgttattcctgctttttttttttgcttcaatttgtttggaatatcttttttccatctctttagtctgtgcatgtttttataggtgaaagatctcttgtagacagcatataattgggcatttttaaaaatccattcagtcactctatgtctcttaattggagattttaattcatttgcatttaaggttattattgttaggtggggctttactactaccattttgttacttgttttctggttgttttatagatcctttctaccttgtttcatctcttattgttttccttgagagattttttttttctagtagtatgttttgatttcatgctcattatttttagtgtatctattataagtttttgctttgtaaataccatgatgcttaaaatcatgttatagttaaaacaagttatcttaaactgattaacaacttaactttgactgcaaattaaagcaagaaaaacaaactacatttaacaccatcccacacacgttcatttttatttttgatgtttcaatttacatctttttatattaactcttaactaattgttgtaattactatctttaataattgtttctttagtcttcatacttaagatccaagtggtttacgttccacaattacaatattatagtattctaaatttgtctgtattcttacttttaccagtgaattttataccgttagatcttttcttgttacaaattagcacccttttctttcagatgaagaactcttgtcagcatttcttgtaagacagatctgatgttgatgaatttcctcagcttttccttgtctgggaaagtctttatctctccattgtgtttgaaggatacattttccatgtgaactattcttggctacaaggttctttcccttcagcactttgaatatatcatcccaatctcttctggcctgcagtgtatctgttgagaaatctgctgaaacttgcactggggctcaggtgaatgtgatatgttttctttctcttgctgctttgagtatttcttctttatctttgctttttgataatttgatgctgtgccttggttaatttctctttgggttgaatttgattggtgatctctgagctttttatacttggatactgtcctttttctccagatttaggaatatcttagcgattatttccttaaacatgctttctagaactttttctcttttatctcctggggaactactattatatagaggttagtttgcctgatagtatctcataattctcataggccttcttcaatctttttttaaagatttttctcctctgattgggtaattttatatgttctgtctttgaggttgtgggttctttaagtctgctattgaagatttcgaataagcttttcataaatttcaataagttcagttattgtattctttattcttaggatttctatttggatttttaaaaagtgtttctatttacttgctaaatttctcaaattctttcaaaatttcactgcattttccatccacattttcttgtgactccctgaaattaaagaggattattctgaattctttctcagacatttgatagatatttaattcttctgggtccattattggagttttgtttgtttcttttggtggcatcatatttccctgagattgtttttgttgttgttttgttttttttaaacaatttttgcgtgttttatgatgatgcctgcatatttgaagagaaagccactcttccagcttctgctggtgttattagtgttggacctctactacttgatattgggacttaatcactgccctgccattgtttcccagtctagggaacacttatagtgagcactggaacttaaacactggactagaactaaattgctactctactattgtttcctggtctgggaaagacttaaatacgtactggaacttaatttccaaaggaacttaatttccaaactcagttgtttccaggtcaggggaagactccacatgagcacctgagctttgtgggaagtctggccagagattcagaccttcctgccgatcatgcttcctgcagcactatagtgctggccggtctcctcagtatgacatctgcatccctgctgattggagctccaagattccagcaccaagtgatcagcacccccactttttgtccccagttcaccccaggtagttcagccctcctagctctcccaggggttcctgtgcagtgagacctgagtgggcttcccatgaagattcccatactggtagggggatcaaacatccacctccaattccatcttcccaccttagaaaccatgagtctgtgtcaattctctgtgagtggcattatacaagcctggagaagagagtggcacagtctgaaatgaccatttttcttagttattatggcctagtgggtttctccacttctccccaagttctggtgaattcatggtggtattcttgtcttttaatagtttccagttgtatgtttgtggaggaaataatgtcagggtgtcttctattctgcaatcttgctcatgtttctccttcataattactgttactttttatagaattgtatttagatctattggtcagcagatttgattataagaaattttgacctatttacatcatgagaacaaagaaaaattttgagaaatgatagggagaattcctcagatcaaggacttgtgaaagatcctgagaactgttgaccagacagaaacatggtatcagaataactctcttgtatcacaaaatttttttttaaatgtacttctttatctcaaattttaattttttaaaatatacatttgattgtttttttcttctagtataagcagatcctcactgcatgttttggggtgtgaaattcgacatctctagcaggttaacctcttgtattatgtcagagtggggaataagctcagaaaaatataatttatggagaacattttctcattttctgggaccttgtaaagaccttatttgttccaggtgacaggccccaagtggaataaaaggccattattgtgagaaatgacaactcagatatagcaaagttgttgccaggagttgatgatgcagaaacaatttattttgggcaagatggtattgaatggggagtctattagtggtattttaccatgtgaatttctatatgaaccatgtctgtgggagcactgctgcattcatttgtgggatgtactgctttttgctagttgccgtcaataaaatctgttctgtagctcttcaaagtggttgattcagccactctgtattcaggccataaagatcatgaaatgaaagtcttctgagctccaattagagtggaatgttatatctcaatgcagaagtcttcttcagtaaagtaagtgtaagtataaatttgtttagtgaaaagtaccttttggaaattgtacttttgagacagaggcattcaaactctgactaccgcttgccaggtgggtaatttaggggatactgcttaacttttttgataattgtatttcctcatctttaaaataaaaataatgatgaaaatgttaattaaaaggatgatgatgatattgacaataatggcaatgatgatcatgacagtgaagatggcaataacagtaacaatgaatctggtgatgatgatgacaatctcaaacaactgttgtaaggataggacgtaatccattcaaagtaaccagcacagaccctggcccactaaagggagatcattaaatttcagctgcccttaactgctttctcaaacctctactctgttttctggattttctttatttgtgtatatgtatcagttttatattgctgctgtcacaaattatcacaaacgtagtggcttaaaacaacatacatttattctcttgcaactctgaaggacagaagtacaaaatcactttcactggatgaaaatcagtgtgtcagtaggaccatgtcctttcagagtctgtagaagagaacccattcccttggcttctccagccctacagtggtgctcctcatattccttggctcctgacccctttctccatctttaaacaaattcattaaagttgcaggatacaaaaatcaacatacaaaaattagttgcatgtctatgagctacaccaataatgagctaccagaaaaagaaattgggaaatgagctgcatagtgaagtaatcagaaatcaattcactgtccttagttctgctgggacctcctgttcaggatttggcagtaccagtgacaaaggctaaagctgcttggaattatatattctccatcttaaaatgccaaggttaccttggacttcaacctcagatgtcgcatgtgactgtctaggttgtacataaagatacgaagggtgcccattgaagttggccagtgcacaacttgtgtggctgtacgtggtgggctttttctgatgcccaccagactaaaaactctagaaatgtgtgatctctatctatcttgtattctcagcacctactgcagttcttggcatacagtagaaattctcatttaaggaaatgaaggaatgaacatataggaatagtcaatacaagaacactaagtaacacctcatctggagttactcaggtcagtatactgagctgctcattcgaatcacctggtggaaattttaaaaaataaaaatctcagcccagatcctattgacagacattctgatttatttcatctggatggggctgcagtattactgcttttctaagaagtatccaggtgaatctaccgtgcagccaggtagctagaacctgctagtctggaagagtggttctcagacttcatgcattaaatttacccagtggacttgttaaacacacaggtgacttttcttactctgtcactctgagtttgggggctgagatattgcatttctagtaatcactcaggtaaggctgatgttgttggtatggggaaccatggtttgagaactgctattcaggaagacagcagagaagataagttcctttagtgtgcataggtggaaaacagttggtagagtgattctggaagagtgcatgcatgtgcattcacatgttttattaacatgtgaatatgaaagatattaagcacccatttgtccattttaaatatataattgtatcccttctgtccaacagcatttcactgtagacatttttaagtgtcagttttttagctgaaaaactagaaaaccaaggaagtaaatcattgcccaagctagacttgatcttttcagcatgtcagagtctcatgctttagaaaaccagagaccactctcactattttgtgttcatcctctttctccatttccagtcactttttctgcactgacttcaggttaatcttccataagagggccttggtgttctcatcttattcctatgcccccactaaattctgagtaagtgtaacagcctttgtccttctgcatgccacacagtagttacctagctaagatattgtcaatcagtttgagagactataagctgcctaacctagagttggaggataataccaatctgagatcttctgagcttagcatcattatcaacttctgttacttccactaaaacctttgtaaatcacagcagatatatttcagaactgtgccacttatctcagtgcctccaggcatttcaaagtagtcacttcacacttgccatcctccctgtccttctgagtcctcctctcagccccagtgtgtctaccacctcaaagcctatggttgttagcctgccttacttgggtcaaagaccttgactccttccagatggatcctaaacttcccttccattcactttatccaaaatgaaattgtacattcttgaaatacacagcagcactcaacaaatgctgaaaattatatgattaaagtaatttgcactcaaatgtaaataaggcttgatgctccatggaagttttgaattttaaagaagagctttttattcccaatggctctaatgtgtgggaaacatattgggggaggaggcacatggggtcagcaaatgctgtggacaattctctgccctctttacctgggctgccgttagtttgtctggcagggactgaatatatggctttaatattctggccaaactatctcctcatctccccttagctttgcaaagtggctgcagtaaaacctgccatgcttggattggcacggctcaaagctaactgtatttgaaacttcacatttcaaatctcgaagaagacttctgtattaaatttagagttttttatcctcaaaggagttgtacattttatttgtgtcaaaatttacagagcactgtcttaggcgctttctagcagttgctttaaagggttgtcagctccaggcatttcctctgcccacatacaggtgttgtcacatgttcccaggtgaggagttagcaagggtttgctgtagctcttggtttaaatgttggcaaaaaaaaaaaaaaaaaaaaaaaaaaaaaaaattacacctgcatcatctagaggtggcctttcccaatggacatttccacttgtgatgatggactgaatattgaaaatcatttctggaaactgtaaagtgaaagaagccactgacactgaactgcctgccagaatcaggagataatttcttttctgggggaaaaaaaaaaaaaaactaattctctaagttttaactgatttcgggaagttaaaactacagtttatccccagggttatgggccaaactgtacttttaaaaaaattatatgttgaattcctaacccccagtacctcgggatgtgactggatttggagatagagtctttaacgaggtgatgaagttaaaataatgtcattaagtttggctctaatgcagtctgactggcatccttataagaagaggagattaggacaaagactcacacagagggatagccctgtgaagacacaggaaagagagaggccccaggaagagccaatcctgcagacaacttggtcctggacttctagcatctaggactgtgagaactaaatttcagttgtttaagccactcatctgtagtgctttgttatggcagccccagcaacaagaaagttgttgtcaaagaatacatccttttgctggaccagcctctctggggctgccccttccctgagcaggtggatttctctgtccgactcctcaagggcatggcccccacctccccccagcattgctgcagacagtgctcctgccattgtcctcttgtcgcctgtctaggtttggttgtccttgttctttcctctttgcctatggctgaaattaagaatggtgacaagataagactataatcctctcctttagtctcagtacaaataataccacattaaaatctggagaaaaggaacatgatgatccatgggaaggacagccagctctgtaaaagcatcactggacgctagcagaaatggtgcactccccaccagaactcatgctcccccttcttcctgcagggttggagctgggaagcagctgcccagacacaggctgtggtttccatccctctccttgttggggattgtccgtgtgactcgcccctgctgagggatggcgagttgaagtgatgcaccttccaagccttggtagtgaagcaggaagtgtgtttctctgcattctctgctatctggttctaggactttgcttctccaagtgtggtcccctgactggcagcatcaacgtcactcgatgatttgtgagatgcgcaaaacctggggcccattcctgacctactgaatcagattctctggggtggggccccgcaatctgtctttgaacaatcactctaggtgattctaattgacctccactttgaaaaacactgggatagaggacatgagaggtctccaaaaggcaagaaccaaggttcctgaattgttgtgtagaggaagggcacccaccaatcatgaacactactggggtgaccttcatgtgactcctaagcaagatgtaaatgcctgttagcttggaccactgaaattctggggtttatttgttacaacagttaggattgtccttaatgaagggcagaagaagatgcgattacaattaagtggttacagaaccagctctgggtccctgatgcaactctttcccactgtttgctttaggaaaagagcaagagttagaatttcatgcattggcatggtctacctgcaacctgttgtgcattttaatttaatttagtttcttggtaaaatttttaaaaccttatttggtaacctctcaaaagcaagaaactaattgttcttctgatgtaaaatatcaagcaaatacaatcaactattgctacttacggggagggggtacataacagagcagacccttctctttgccaagactgtcgtgaaatgcatttcacatgaatgaaacatatgcctcccactagtaggagccacagcatcccttgaaggctatcactcccctgaaatgagagctacctctcagactaaagtgtggtcagaaagggagacttgaatgggaggatcattttattgactgtgccttcagaaaaagaaggtggtttctgcatgacaggaggtaaggctgcacctcaccttgatatgggctggaagactgggagcccagaacccactcaagagccccttctgaggtcagctggatgctggatgtggccaggctctggaaagccagcagagaatgagatgctctttctgcctgcggagattgtgttcctctccctgtggcttagtgtcatcagccctataatcacctgatagtcatgacacatgaacccagacaggttgctgagtgtttttgagatggagttttgctcttttgcctaggctggagttaagtggtgcaatctcggctcactgcaacctttgcccccttggttcaagtgattctcctgcctcagcctcccgagtagctgggattataggcacctgccactatgcccagctaatttttgtattttttttagtagagatggggattcaccatgttggccaggctggtatcaaactcctgacctcaggtgatccacctgcttcggcctcctaaaatgctggcattacaggcgtgagccactgtccggccggttgctgagtttttaaaagcaaacctctccagtaactgggtaaaatgttgatgtatttccttataaagctgtgtgtctctattttttatatatatacacttgtgatcctataatatgtatcatttctgccttacagtgaaattaaagcctgccttttattttataaccaagagtcagaattcaagaaattcactagtaaagcaatccattagtaaaaataagaaattagaataaaggaaaatattgtctattgtcctaactcccataattctagaatcttccttacagtatttgttccgtagcatcaacttgctttctgattgaaatcactgtgtgactgtaattttgctttctgcttaacattttatcttaagtattttctatagtgtttcacggtctttttaaatgtaatttttgatccataatattccataaaactaaagttccacaataaactatcttcttcttgtggagtagttatataattttcaattctataagggtttttaagtaaaattaaaaagaataacttggtgcaaaaaaaaccctatgctatttaagattgtaacttcagtatatgttatagaagaaagaagcttgggcttgacaatctgtgacatcatagaaagatatttggtctttgtccctggttcttgacacaggagctcctaaaacccttgagatgtcctgaatgacaagtgtgaaggaagcctcttttgttctaatgaggtggttggaggccctagataccttcaggatggggggctgcacaccaaaaagaccaagtcacagtgacagggttggtcacaattggggaagcctcagaagaaatcaaccctgtggatactgtgatcttgaacttctaacctccagaaccatgacaagatacatttctgttgtttgagctgcccagcctgtgatatttcgttacagccctagcaaactaatatacccacggcccccatgagcttaccccctgacttttggagagagaagaggagctggaagttgagttcagttaccaatggccaatgatgtcatcaatcaagcctatgtaatagaaccaccagaaagccccctaaatgatgggcttcagaggagagctcctgggtgggtaaatatccttgagtgaagagagggtgatgcgtccagggagggagtaggggctctgtgtccctttccccataccttgccctatgcatctctcctcacatttggctatttctgagttacatcctttatttgaaactgataatactaagtaaagtgatttcctgagttttgtgagcagttctagcaaattatgaaaactgaaaggggagattcataggttccccttgactttgtattcaagttggactgaagtgtgggtagcctggggatgagctacttgcacctggcatcagaagtgagggcaatctcggggaatggagcccttaagctgggggtggggaagtctgcactacctctgggtagtgagtgtcagaactgatctgaaatgtaggatatgcatttgctcttccagagagaattggttggtgtgagaaaaaagtctgcccatttggtatcagaaatgctgtaaataaaaaatagtgcagaatgcaacagatttgggtttgaatcatgactctgtcactttctagccatgtggcctttgtgatctttcatacattagttaatatctgtcctccttcttaaaataggactaatctctaccctataaggtgctggtggttgttctttgagggctaaaggatgcaatgacatttcaaatctcttagcacagtgtgtctggaatgtaggtgggtactgcacaaatggtaaatatttgtattacaaaataggcccccaaaagtggaaatactgggcaagagtttgcagcctttttttgggatcttgacacctatagccaacttgctttctaaaacatgcacacactcatttcagatgaaagcaagtgtgttttaaacactgtggcagtttgtaacagttccttaattgctgtaaattgtatacgttccttaactagttgtatttcctccttgctacttgcctgctcatgtatcttttgaatggaatttaattcagtaaacacaaatagtcatctagcttgtatcagtgccgtactaggtgttagaaatgcaagcataataggatgcagtacttacccatttggaactttaaatcaactggaggagaaaaacacgtggatcagtaccctcagtgtgatacatgcaaataacatatatgtacaggcaaagagaacagagagtaatgaattcctttgctaatttatctctcaatgctttagcaattttttaaaaattcatttgtgaatagttgaccagtttaaatattgaaccaaccagcatttctgttttgtgacaataacaagtcaaaatccaagattctcttcttactttgtctactctcttctcttccaaaagcacattcacgtttgtctacataaatacatgagaacattcagaacccaagaaggtggactgacaaagctgagggacggtagagactgcacgtattaaacaagcaggaaaacaaccctcagagtctacattttcatacaacattagaaggaaaaaagggtattaactgaaaagaagggtgtggaaatcaagtgtgaacgagccatattgaaactctggctggaatggtgggatggaggtcccagttgaatttttcctaagaggctgcttggtaaacattatctgtagacctctccgacaattggatttacattcgaagaagcagattgaggctcaccctgatagaagaaagtgcagtgatttacacaggttggatggaagacctttctgtcctttgtgtatgcatggcttgactctaagctctggcccctttgtctcttaaagaggcctttctcaaggtggctcttgaatatttttaaaagtatttttcaaggctccctgcatccaagcatggcacccatgtgctgtgggtccttctctccctctggcccatgagtgacttatctgagagatgggtttgggaagaggaagcagcgtgccccttttcttatcttcctcctgctctcctcttgtagccccgtagcttgatctctgtagatgctgttaaagtggaaagcttcaggtgaaaatttccttggattggagactctcagtgtcatcttttgacaacatttagcgtttcttggggtgactccgatttctagatgaccccacatcgcatctaatgcacatctaagttaatcctcacagggcttactctgcttatcatttattaaggactgacatttgtataattaagttagggcccatcatctgtttaagattcaacagtaagtgatgtcggggtttacggatgccaagacaccccagctccctgcctatatttggaatcaattaacagaaagatatagagaggggtcaggtggagatcaaatatcatctgtttatgacaaagtctgagcttgacaatgtggtgctgacgggtggcagcaatggccttgctaatcctaaaccccagaaccaaaccaagccaggcccctggagcccttcccccaaccacaagcagggtcttgctgcaacttaacatggggagagtggagcagagcagagcagtgggcatggcccctgaggtcaaggaggctagaggggagaagaaaaggaggcgtgtcactttctcttcccaaactcacctctctgataagtcactcatgggccagagggagagcaggacccacagtctatgggtgccatgctcagaggcaaggtttctcagcagcggcctattgacattttgggttggatggttcttcaatgggagggactgtcccacacacagtgggatgtttggccacatccctggcctctactcattagatggcatagcactccccaaaccctccctcatgacaatcaacagtatctccaaacattgctaattttccctagggagggcaaaattacccccagtggagtaattccgcttctccaatgtgaggtctcaccaaaaagtagactgggagtagggaattgaaaccgcaaaagaaactgcaggcagcaacctcctcagtcccatcagtcagtatccagcaggctcctctgttctttccaagctcctggttcatacctcccctggcacttgtctccagcctgcctccctgtaagtgcctctccagtgggttatttacgagtgcagcaactacctggccttttgcccctccagcacctgcatgcatgtctgcaccctcccagtgcctggcacagtttgccatacctggggcctcttttgtataggtcaggaaggtaatgattttagagaaagtttctcagatacaggaagaaaaaaatagatgagagtattttcccatattaatctttaactgtcgctgtaattgcctcaaatcactttatgcatcgtctgacctgccaatcacatggatcttacccagcatagaaaagcagagactctgaaatagtagaaaaaatagcaagtgatcatcatatccgtggtgctggctccaagcccaggactcgcacaaagtaccattaaatggtgataatagtcacatatattgctttcttcacattttaagtcctctcaaaaagtgtttcatattcatcatttgtatgcatttgtcttggattcaggctagacttttctagttttatgatacaagtagctaattaggactagtataggggcaaaagtaacttattttgcaaagcatgctcacttgaaattgcctcaataattgtatgagctattttaggaatcagagctaatgtgtgattaattagaggaccttgtccacatcagtcaggcaaggagcctccaaggagatgaagttattgaatcagtgtatctcctctaaggcagagaaacatgcattcttcttgtgatttcatgactcttaattggaatgagtaagagactagatattgctgagtcaaccttcaaggttcttggcatctccaatacaccattctccttgaaaacatttcagtatgttcaatgttgggcagttctaattgttagaatgttctgccttacatggtggtggcatctgcctctctttaacttcattcttaaaggaagggagggtcctagggtgatataatagatttcatcctcctgcccacagcagtcattgcagaatcttcagaattctatcacatttgtcccatattatggtccctggttcctctaccatccttgtttccctctgttaggggttgaatggtatcccccaaaaactatgttgaagccttaaccactgacctcagaaggtgattgtatgtggagatggggcttttaaagaggtaattaagcaggcctggtgtggtggctcctgcctgtaatcccagcactttaggaggccaaagcaggtggatcatgaggtcaggagtttgagaccagccgggccaacgtgataaaaccctgtctctactaaaaatacaaaaaattagccagatgtggtgcacacctgtaatcccatctgctcaggaggctgaggcaggagaatcacttgaacccgggaggcagaggttgcagtgagctgagatcgcaccattgcactccagcctgggtgaaagagcaagactctcacccggggggcgggggggggggtgcagtgggaaggaggtaattaagttaaaatgtggcctgtaagatgggccttcattaaatatgactgatatccttataagaagaggaaattaggacacacacacaaaggggaatgtgaacatacattgagaagacactttctacaaaccaaggagagaagcctcagaacaaaccaaccctgtggatactgcaaacttgaacttctaacctccagaaccatgaaaaaaaatatttctgttgtttaagccacctggcttatggtattttgttacagaagccctagcaaactagtatactcaccgccccatgagctatagcctcaactttcccctccttatcatgaggaccatgattgcaactgccttgtgggttgatggggaattccatgagatcatgcagtgtctgtcctggtatttagtgaaattgtcttcttgttaacattattctcactatcactcctatcatactacctgtgtttaagtgactaatgaaaacattaaatacaacaaagttaatactagcctaattttgtgttacttcagaatctgtaaggttgactttgacccattcctaaatacttcttcagaacagtcatgcttatggctcacatccttattaccaaaccttccttaccgaagctcatatttgttgcctctgacattctagtttactggcctcatactttaaaagtatgagagaaacaataaatatgtaaattattttgtttttaaatgcatagagttggtccaaatatgcaaacataaaaataggtctttaggtagtgacttggggtcataggtttactttctatgggctaaacatttttctgatggtaacaggatcattccataatattttgtaacaatttctgttttgggctttagtaatcattgagcaagttgcatgtgctatattgttaacattgtactctaggtgccccaaaatatgcaaatactctaaatctactgatttgaaatctggggtattgtgagtccggggtcttgctcccaccccctcctctcttgcagtttgtgttgccttggcaacagtcttccagcacatcacatcaggtggcctcttatagagacagcatcatgggctggacagcgtgccaggcttgtggccctggggcatccttgatagatgctatgggcgttattttctgcttataaaatcttagaacagttatgtctttacagataagatttgatttttatcaaacggtggaaaatgctgtgactggcacggtcttcacactctctcttggaaatctgcgatcctgggtcggtttaatttaaaacattccagtaataactttcagactttacaactcaattttattttgagaagtcatcatgaaggaaatatttaagaagtctcattcctttaagtttaaaaatgttccacaggattcatttgcaacagccagccactcaccccaaccccaaacttccagaaaaaattatgcctccaggacatttctccaaatgaagtgtcaagtccaaatcaagtcaaatttccaatgtggaataatggactctattttatgacctcctgcgccccggaggctcttcggagcccattacacagctggtgcatattaggtatagaaggaaagagacctgagtggctacgggtttctgctcggtgaagcccaagccacatttcataggttctgggattattaatggtatgtctagttgccttgagaatgttcaactccagtctgttatgaatacttaatagcaaggagaatgtgattcttctcttttcagagacgtttctgtgactcggcgaattcattctagtgtgataggcaaactgtcaaaattaatgaattccaactgagatttggttgtagtgcagttgtaaattagcattaataccacagtgtatgttgaatgtgctacattttcaccatggatctggcctagaggatgtctttggaggaagccactctaaaaatcatgttttctggtttggttttttcaatttttgatcatagttttaattctggaagaagtatatgaaagtaggtcattaagattttatagaacacaacaaaaaaagaaacaggaaataaatgttataaccaaagacatgttagcagagttgtcttgtttttgtgtggctgtgacttaaagatctgattactgaacctcaatctatctaaatgttaagtgattacaaaggaacacgattcagtttataaggctttagatgagctccaaggactacacggcatacctagcccaagcacatcttattatgagaattttaaataatctgcagcaatgtttagatcaaaggtgttttaagtggggatttggacctttaaggagctggaaacagaactgtgtgtgtcctttttgttcatgacagagtgcagcactttcttctcattcttaaagggttctgagcccaaacacagtcactgcttaactgacaacctagcaccaaatcccagctctgttcctcacgacagagttcaaagtttatatggtttctcatctctgacataaaaatagcagcaatagcagcctgtgaggtgtagtttgaggattaaaataaggttttgtatttagattacttagcataatcctagcacataatgtgtattccataaaagctaattatttaatcatgccaagaacagaagcaatagttacagctttgaatataaagtttgataatgcacttggtgatattttcttggcagacacggggctagcgacccatgtcagtggagattgaaatattgccacgtgtagatgcattaccactgagtgaaggagcacacttgggcatcttggtgctttgctgacacacaatacggaatccagggtaactaatttccttctcttctctagagctctgacttctcacctagtgcagtctgtaagaataaacatctataggattaaatgtgacaatgatgggtgaaaatgcttgggaagggcctaaggtgctgtgcaaatggagaggcggcattcagaatcatttgtagtgggctaggcatggtggctcatgcctgtaatcccagcactttgggaggctgaggcaggtggatcacctgaggtcaggagttcgagaccagcctggccaacatgataaaaccccgtctctactaaaaatacaaaaaattagccgggcgtggttgtaggtgcctgtaatcccagctactcaggaggctgaggcaggagatttgcttgaacccgggagacggaggttgcagtgagtcaagattgcaccactgccctccagcctgggcaacaagagcaaaagttgtctcaaaataaaaaaaaaaaagaatcatttatagtgaatgtttaattttaaaacactatatgtcactgagacttattgatatttaattgaatttagcctaacagtcttgtgttcaagaagtattaaatatttgttgagactctttgctacatgctagaaactattgtaggaattgggaatacatcagggaataaaatcaaccaaaatatttactttttagggaccaaaattttaggataggtttagaggcagacagttgaagcaagtataacaaataggtaaatgatcgagtgcactaaagacgctgagggccatggggagtaagtgcaggcgtgggtcggagggggcgctgcagtagtggaagtgccgccatctttaccaggcagtcaggggaagcatccctgagggggagacggcacagccaaggctggaaaaggtgagccagggagtttctgggagaaaaacatcccaggtggagggagagcaggtacagagacccagaggtgggagcctgcaggggtggtctagagacgacaaggaggccagtgtggctgcggtgggatccccaggggagggtggtaggagatgacatcagagaagaaacagtgaggatggatcctgtaggaagataggcttttacctggagaatggggtcctcaaaagctcagaacagaggccagagatggcctgagccatcttaactggatcactctcactgatggagctgatggatgagagtgtgtgtgtaggggaccagggtagaagcagagagacccattgggcaccagggagaggtgatggtggattggaccagggagtggcagaggagatggcacaaggcagatgcagggtatattttgagggtacagctaagagacttattgatgctgtgaatataagatatgaggaaaacagggacctctacaagcacccacatgtttgggttgggcaactgttaagaatgatgctttttacttcttcgattaaaactctcatattttaaggatatttttgagtataccttatgtgactcttattaatttttttctgaagtactaacaaatgtgcagaagaatcacatacatgaggaggaaggcaagaaaacttcttgaagttttaagaatactggatcccagaacaggggcatagctaagtggacaaggaaattaggacaataatttaaccagggttccaatcaacagattttttaaagtcttgcgtgtttgagactcctaaataagcctctgtaggcgagatttcagcatcgtgtgttttccatcattgagagcctgtggggcgtcattagtctccagctgactgatgtaggtgagaatgtcttattttgttttttgttgtttgtaacagaatgcctgacactggtattatagagaaatgatatattgatttcctccaattatggaggctaagaagtccaaggttgaagggccacatttggtgagggtctttttgctgatggggactcagagaagagggggctgggtatgccagctcagatctctcctcctcttcttataaagtcaccagtcccacttccatgacaacccacccactaatcaattaatccattactccatcaatccattcatggattgatctattcatgagggcagagcctacatgacccaataacctcttaaaggctctacccctcaatactgccacattggggattaaatttcaacatgagttcgagtgggggcaaacattcaaaccatagcagagaatcagacaaattgtgctgcgtccacttggaaggcactgttccgcatagggttggtttgggctccttctgatcatgattggaattagacaaactctctggaaacacactcacttacagactttgctttctgtgagtatttttttttttcctgttaaagctgactcttctatgttcagacccatatttttaagttatctttttacactgaaattcttaatctttcaagtttagatatggatttaccttgattttatggactgtgaatgccctcttttcttatctttttctattttatctatataatgatactaccatttggggttagatcaatatttatgatttacattattatgactatgtaaatattagctacagctgagccacatagtatatgatgaacactttttctattacagctttgtgtttttcctaggattaataatcacttgcttctttgtttacttagttttcactgcatgtgttactaattcattccccaaattctccaacggactaaacactcttcttaatacattcagatgcattagcgtgcttgaatgtttatttttttcctggaaacatctctccaggagccttctttctgctttaatctggactgatttctgctgtatgtttgttgttctgttatcgttcacagttattctggaaattctttttgtttctcacctatgttgtaccgtctgttttctggatatcgtatgttctttctgagtttgcaaccttttaattcattttttaattgctttttgaagaagggtacatgagaggtcaaaattttgactttgcatgatctaaaattgtcctcgtttacttgtttgatactttgagtatggaattctaggtcagtcacaccttgctttataaatggctgcacactgaggtccagaaaaggcaggcccttggtctccacactcctaggtcagaacctgagagcaggttccaactacagagaaccccagaaatgatggcaccttttctcacaaagaaatgctttttccacctccacagaggtctgccttcggttacatttaagtgttgattgcattgtccatacactcagtgctgtgtgagcacacggtttacaaggatgacaatgccccctttgctgcattcaaggtacaaatgttttggcaatgaataaagtcacatatacgaacagtctgttgatatgcaagggcaaaaatacagaactggatcaggtggtatgagtacaagggatggtaaagtcaggtgagtttcattcatgcagtattccccaatgtcctctgggaagatagaagagtacctcatacctggagcccggacgcaggtttttttttccatcactgctttggcgacagtaggcattgctgataagaaaaggcaactggacatctacactttgtcattgcttcctcatcctgccacagaagcttcattaacatggaaataaagggatttacaaacactctaaggacaaaggggaagagagatgagatgctggcagtcatgagatgccaatggcaatggatttaacattgtggagaaagccaaaagaagtcatactagaggaagccagtgagccagtctctcattcagagcaaaccctggaaaggctggtaaattcgagggaccagattagactggagtcaatccttaaagagtctttcaaagtttttttaaaaattgtcatcactcatgacttagggtgtatttgcatttatgagaatggtcatttattttgtttctgaaacttaaacctgtgcgttacatgaagaaagaaattacttaaaacattagatttctgtaagtccttaggtcagagcaaaatgaaaaatgaagcacttctgaacatagtgaagttctagcaaaagaaaataatgctcaacagtgtattagtcaatgaaactaagaagaatttatgtctttttgtcatttcacttcagtgttttcacttaatgctggagtgaaaggtttaattaccgaacttggattttacatttttatgctgaggtaccagtcagtctctggttataattcattttcttctttaatcataggagaaatgattcagttggctttggttaacgtcctcctccccttccctttgataatcttactttattgttgcttcactgtttttttgttgctatttcacattgccatgtttttggacattcaattttgtaattttttccctctctctccaactctttgcctcttaatctgcagaaagcaattctgttaacattattgtgatgttatctttatttctctgttatttctgctgattttcttcatttgtaattctttacataactctgtactctttcttcattcgtttgttctattcttgttccccagtttttatgcttccgaatcctaaggagccatttacatcattttggtttattcatgtgctttactgcctgtgatcataatgctcactgggtcttctgctccttccaaatcgctagccactttcatgccttttgaaacctttgagcttaaaatgtaaatgccggaacgtagtaaaccacatacatattattcattacagattctatattcctctctgaaaatgtacacttaacccctagcaatgttaatgagagtgactttaatccatccaaagggatggagagacttttatctctaaaatgaattccctatacacatatggaagtagtactctagaaatggattgcaaacaatactcagacattttctgggtaaaacactaatttatttttactttttttctccagagctttgtaaaacccatggcaaaaatcaggctttttccttcttgttgcaaaataagtacaaatattggataaaaagaacattcttacacaaagtagctaaaatcttcgaagtgtgttcttatagcacctcagaaattctttttgtcagccactcatccttgtggtcccttgatatctatataatggaatttagattatagtagatgatgtatataaaatacagattgttacttcttaaaaggaatctctttagttatatgtagtatgaaaaccataatatttttcttttaaacatttatttatgcattcaataaaaaatgtgagggcttctattatgtattagccagcacaccagctgcctctaagaataagattgcatcatctcctatgaagcatgctgcccctcttctagattgcaatggagtggggtgcacatgcaaaatagctatgaaaacattgatgacagtgtgatgcaagaagctgaaaggtaggacacggtgtctagtatgaaaggtagaagaccgggaataaattctaaggaattggtgtttagctgacattcaatgaatgagtaggagttaattggataaaggagggtgaagtgttccagctaagagcctagtaccagcacagaccccgagttggaaggggattggggacctaggacactgaggagaccagcgtggccagaccctagtgtatgacagctgtgagatgacattggattttttctactcacagtttcttaacctccaacattcaagaatgcaacctacatctcaacaaaaaacactgttacgttaccctaatggtaattagcactaaaaaaaaaaaaaaagagcgagagagacccagctctcagttctccttttggattttatatttttcactttaattccagcagatttgcttcatgtcctctgaagctcttttattaggtacatagacatttaggattgttatgtcaccttgatgaattgaccactttatcattagggaataaccatctgtccctagtaatatttcttattctaaaatctactttgatattaatataatcactcccactttctttagagtagtgttagcttatattttttctattttttttacttttggtctatcagtttctttataatagaatttctcctggatagcgtatagttaggtatttattttttattcaatctgacaatgttttacttttaagagtgtttaggcaatttatatttaatgtgatggtcaatttggtttcgtttaaacctatcatcttgctaattgctccctattttttctatctgtcctctgttcctttatttttctctttcttgccttcttttggattaatggagtattttttaaattgtcaattttacctgcattaaaggattaacatgtaagttttgtttttattttgctttgtaagtggttgcttttagagtttacaatgtccatcttcaaagtaacatggcttactttcaaataataccacttaatttatagaaggaccttacaacaataaatttttatttcctccttcctcctgcctttgtgttaatattgttattcattttatctatatgttacaaaccacacaatgcattattattgccttaacagtaatgtatcttttgatgatttaaagtgagaaaatatgattttatattcacccacatgcttaacatttttgtcactcttcatttctttatgaagtcacaaatttgcatctgatattatttcttttcttcctgaaagattttaacgatttttgtattgctagtctactgacaatgaattctcagctttggaatgtctagaaagttattttgtctttatgaaaatttttctgcatatagagctttaggttgacagtttttctttcctgtcttttttttaaaaaaatgcttcaaatttctctccccttgtcttctgttttgcgttgtttctgatgagaagtctgctgtcattcttatctttgtttctctaaatataacatgtatttattttttaatctggttgcctttaagtttttttctttatgttggatttgaacaatttaatcatgtgtcatgttgtggttttctacatgcttctgtttggtgtttgttgaatttgatggatagttgaggttctagtgttcattaaagtttgaaacttctgtatattaattgttcgattttttttctgtatctcattttcatcctagaactccaattatacgtatattaggccaaacgatattggcccacatctcaccagttttgtgtttactgtttttaagcctttttaaagtttgtttttcaatttgggtagttttaattgctctgttttctggttcattgacagtttcttctgaagggtgtaatctgccattaatcctatttgtctaactttcatttcatatattacattttgaatctctagaaggtccatttgactgttttatttgcagcttggctgtttgtattttctccatttctctcatcaatgagctcttcctttttcctactgtcttgtacatattgacagaatatttataagagtgatgttaatatccatgcttgcaaattgtatcatctctcatttatgtgtctttctgtggaatagtttactcctaataatatgccatatttcccttattgtgtccaattttttattgaatgacagacattgtaaattttatattattgattgattgttggtttctattaattatcatcaaagttttttgttgtgcagttcaattacttagactcagtttgttcccttctaggatcacttttaaattttgttatgattaatttgtcccctgcagctgtgtgatacatttctgaatactcaatctgatgttctatttattagaagttcttacctcttttgctggttgaaacatgaactattttctcccctgtgtgagcttcacagattttcacccacttctttctggtgttcctaatccaaccttggtagttttcttacacgcatgcaaatatcagcacacagttaaggactcatcaactggaagctccttccgctctctggagctccctctctatataacttccttctttccactttgtaaattctagcagccttagtcccctcaagtgtcatacttggtccccctaaccccacaatataaccaagttttattcaaatttcctccttttggaattatcttagaaactcaggaagtaagctgggccactcataaggtccactttgtttgtttccttctttcattttttttttttctgtactgtctgaaactttagtgaagacatagagtaaatccagttcttgtttctgtgtttttgtttgttgttttatgatggacagagacagaatttcatatttctaagtgatgacagttgcaacatcatttcacagcttgggagtagatagaatgagtgaaatatattaacgttaaaggcaaaattgctataacatatgagcacattttaataacctgacttggaatcacttcatagaagccttggaatgctttccaagtcattataagcccatcatttaactgatttgtgattgtctgatcgagatgacactgaatttctaagcatttatccaaagaaaaaaccattttggagtctcagaatcagctaaatgttatgctttctagatatgtttacctaaggctaagttatattccctttcattttggaagacctttacacaagcagttcattttagtaagcatacccactcacgtattcctatgaaatcaataaagctaacttgaacccaaatggcatttccattcaaaattaatgtacccaatttgcaaattcgatagcctgttttagttctcatgttttctgacctctctgaagcaattgacagtgttgaaaactgttggttaacgtctcaaaatgtctttttgtttctaagacatcactctctagggtttgagctactgatctcctaatttcctatttatctccttcatgatttttttccaatttctttaaactcttttaattttttaattgaaatgttacatacatgcaaatcactgtgtacacatgcagtgtgcccagcacccagatcaagaaaaagaacatagcctgcaccttggatgccacctcatggccctttccattctctgcacctgaccccacccccacgggcaaactttattctgactctcaacatcatagattagtttttcctattttgatgtttgatataaatggaacaatacagtgtaaatccctttggtgtctttttgcttttcttcaccattatagttgtgtgatttataatattttatgtgcagattgttcattgttatcagtatgtagtgattcaaggtgccaatatatcacgatgtatcaattttattattgatcgatatttggtaagttttcagtttgtgactgttacaacgtgttgctgctgtagatattccagcgtgtattttttgatggacatatgcatgtgcttttgttgtataaatacttaggagtgaaattgttgagtcacagtgtacacatgtgttccctttagtagaggctaataattttccacaataactactgatttacattactacctgcattgtttgagggtcttgttgctccacattcttaagaccctcaatatattctgtcttttccattgtagttattttggtggatgtgtagtagtaccccactgtacttttaatttactttttcttaatgaccagtggcattgaagcactttttaatgtgcttattggccatttatatattggcctttgtgaagtgactgttcacaccttgtgtgtgtgtgtgtgtgtttttcttctttggagacaaggtctcactgtgtcgctcaggctggagtgcagtggtgcgatctcggctcactgcaacttccaattctggggctcaagtgatcctcctacccctgcctcctgagtagctgggactacaggagcatgccaccacacccagctaatttttggtagagagagtcttgctatgttccccaggctgatcttgaattcctgggctcaagcgagccacacacctcggcctccaaaagtgctgggattacaggcatcagctactgcacccagcacttttgtccatttttgttggactatctttttatattggtgtgtaggagttcattatgtattttgggtacaaatcttttgtcagatattttcctaccttataaaatactccctatccctgaggatttacttctggtttttgtctcttcttgttctttacacttgatatgccttggctgtgccctcacccaaatctcatcttgaattcccacatgttttgggagggacccagtgggaggtaattgaatcgtgggggcaggtcattcccgtgctgttctcatgatagtaagtctcacgagatctgacggttgttagaagttttcctgcacaagttcactccctttacctgctgccaaccatgtaagacgtgacttgctcctccttgccttccaccaggattttgtggcttccctagccatgtggaactgtaagtccaattaaatacctttctcttgtaaattgcccagtcttgggtatgtctttattagcagtgtgaaaacaaactaatgcaacacttttcttggaatatctcacccagtgatagacttaaatttccctggctgccaaatatgtctctagggtcttggactcctatttccaatttgctattgggtggcccaggggcagtgccctctttacgttagtgaaactgacatgttgtttcctttaccaaccagctctgtcttgtaggctctctttgtaatagtgtaactgtgcaactgggtatgcaagcaattacatttgcctcctattgactttttttattttcttcactctttttgctcccacatccctgcccaccgatgctggtaggatcatatcagacatatccataattaggccttttttctcccttctcaccaccaatgcccagctggcctagactcccagcagagcagtctagccaggctttctgcctgcagtcttctctccctgtctactcagtgtttactttctcaaacttcaatttgggaaattgattgttcattgtcaaaactttcattgacttcctactttttaaaatagctttattcaaatataatttagataccataaaaagaatccacttaaagcatacagtttagtggtttttagtatattcacagataaggtgccttcaccacaatcaattttagcaggttttcatcacttcaaaagaaaccctcctatcctgtcccgttacccagtcctaaccataagtaagccactagtcgactttctgtctctacagatctccctcttctggacatttcatacgaatggagtcatacagtatgtggccttttgtggctgtaattgagggtcatccccattgtagcttgtgccagttcttcactctagtttattgctgagtgatatcccattgtaaggctaagccgcattttgcttacctgttcttcaggggatagacatgtaggctgtttccaccattggccattatacataatgctgctttaaacatttgctcacagttttgtgtggatgtatgttttcatttctcctgggtatgtgcctaattgtccttattgtctgcagggctaagcgcatgctttttagcttggcacctgacactctttacaatcttgactttataatcagcacccttccacgccttggttattagtgtgtctgctggtcttggcacagtgccagatacatggtaggtgctgaagagtgtttccaagataaatgaatctaagaaacctgtagctccctctcctaatcgtgcaacacttttagctgtgcattgaatttcctgcttcccagcacctttttatttctctcctgactgggacaactcaatgtcctaatattttttaagacttctgcctagaatgtacttttctttcctcctctggaaagttgtttccatttttcataggtcagattagtttctctatcacttatgcttctgttgcattttgtgaatgtttctgtcacaaccttcggtaaatagaattataattgacctcactatgtgaactagagtacccttcagactgaaatttccttggcagtagtaccaggacttgttatatcttgcattactgggcccttacacaagacctggtacctagtaggtgctcaataaatattattgcatcagtgaatgcttgtgtcactgcctactgcaaaattcctcccacatctccccttttcaccctgccctgtttgaattttaagaaaagctaaaatattgatttattttctttttggtgtaacactcttctttatgtttgtcagtggagccttggttatgccgtctgttacagggatgtaaaatattgagaagtctgcaactgaagaaacaattctccaaggtccctcccattagctcccttagtgttggtaccccaggattttcaaccctgaatttcacaagattgtgctgaatgtttcatttagctttctgttttgaacccacagttattttttaggaactttcacacacacacacacacacataattcacattaaggttgcctctgcccttactggaggaagcaaatgttactgtattaaagagcaggaggcactctataaaaagaagtgctattatttaggcagatggatggtcccttagatggaagaaacaaaagctgttggaatatagtttgggttttcttttgcctgtggccatatgatgtgtctcttagagaatgagtttatgttacattattaaaccctgtggcatgaaggagaaagactaatgtaaaattctttaaaaatataaggagaagtgacagtaatcccccataggtcgcttatctctttaactgctaggattaaacatttatttatcatttttttcctgcagtcatttaaataatttcacaagctggcttgtggaatgagattttcaataagaaactatacatttaattaagcaatgtttcttgtatacatttacatttttaaagtcttgctattcttaacaagactacttttaggatacaagaggataaattcaaatatgaccaaattttgcttagttcaaattacccacagtcgggttgatagaaaaataatgtagggaaaaaaaataaaagaatcctggtggaattaattagccttgaagagtgacagttacctcattcctaacaatatgtttggggtaatgtcagtttcttggaaagctcaaatgtaaaattacagtgctactatcagcatttttatttgagttgaaaactgccgtgttgaactattaactatgcttctgatctgaaccgatttcttagttagcaataattttcatattctgacttatgaagcattgctaaagactttagttatggttgggagagaaaactataaaacacttacgacttgatgaacacccctgcctctcttctctgtgggtaagagctatcgcttgtacaaaatgtatttttctctgccaccttttggcaattggtgttcactgtgcttcccagcttagccatagccccaactggccctggaggccaaactcttggtttctgccagtgatggagaccaagagaaaaacgatggatgtttcaagtaagatacctggaggatgctaaatctcatggacacagcttcccctagatctgactttccggaataaaggcaggcatataatgaaactaaaatagtgatgtgaaaaggtttcacctattctgtatgagtgtgaagagtgaaactttcgtgaattgttgtcttggttcattttctgctactaaaacagaatacacagactgagtaaattgtaaacaacagaagtttatttggctcatggctctggaggctgagaagtccaaggccatcaggtgaaggtcatcctaggtggaaggatggaagacagaagcaagtgttcaggatagaaagaaaatggaggcagaatgtattattttataaggagctcactcctgtgataatgacaataatccattcatgaaggatctgcctcttacgagtcaccttttaaagtttccacctcccagtaccattaccctggtgattaaatttcaacgtgagttttggcaggaacattcaaatcgtggtattctgccctggcctcctgaaacttctaacatacaaaatgcattcattgaatcccagtaccccaaaagtcttaagtaattccagcatcagtttgaaagtccaaagtctcatctgaatcagatatgagtgagactcaggcatgattcatctagaggcaaattccctccagccatgagctatgaatcaaagcaagctatctaattccaaaattcgatggtgagacaggaacaggatggacattcccattccaaaaaggagaaagaggcaggaagaggtaacaggtttcaagtaaatctaaaacccaacagagaaaacaaccttaagtttaaagctggataagaaacccctttaattccatgtccctcacctggggaacactggggtggggattgggtccccagggcctcaggaaaagctgccttggtggctttgttgggctcttgggctcagtttacccagcagctctcatgggttggagtcttatgtctgcagctctcccaggctgatgttatgtgctggtagctctacagttctgggatctcagggccagccccacttccgtggctccactaggcattactctagtggacagtctctgctgcagctctggcccattaattcgtctcagcaccgccctaatggggactctttgtgccggctccacctctaaaacaagtctctgcccagggccgcaggctttctgggaagtctttgaagtttaggtggagaaagccatgccccacagcttttgcattctgtgcacctgcagaattaacacaacatggatgccaccaaagtttatgattagtaccttccagagcagtaagttaagccaggcctgggaccacttgagccatggctggggcagctgaggaatactttgtcacaatgcagcggataggtcccgagacagcttgggtagcaagccacggagagtgcccaggcctagttattagctcatctagttattagattaatgtctcttctgcctctattctgctccctacttcttcctttattgtgacaatctaaagttggtgcttagtgtttaaatgactggttacatgaccatttagtttcttaacaagatgtagtgctaaaatgcatgagctcattccaccataccaaatcttgaccaccatatgccatcctcataactttctaacagttcttcctaatgaagttttctttctaggctatagtaggccaggaatctcattacacttgcccttcctcatccccacaccaacatatttattgatatatttcctaaccttagttaaagaatgaagttttgccatgtgcactctaaggtatatttgtgcaaggaaagacagcaatccttcccatctctccttagtgaggttaggggttaaccttcttggttttactaaatagaagtctacattccatataggcacacgagagcaagtttcctaatgtaactgtgacacaacacacgtctcaatgccctgcaggattgtgtgtcattgaccactgtgtttatactgataaacttttctataattgaagcctttggccctggtaacatttccatcctatatgacaccagtgaaaagttagagttttcattggtgccatatatggcctaacagccagagtgaccctcagatctcaccccagtagtggacctgtcaggtagatatcatctgccaacatccccaaggaggtgtaggtcttcaagtgtgagatcatccatgttatttccagcattgttgaacaagacacttcttgagacgcacagattgacaatagcttttgatgcttcccctgatcaaggagaaagagggtcttatcgggggcccatctactttggagacatctacattgtgtgtccctcacaggggagcagaattcacatcagtatgtaggctttcctgttcatagtggaaggggggccacagtttgtaagcatctctctatatcaggacctcgctaaaggctttcgcctgtaccccccaccttctctctctctctctctctctctctgtctcaacttctatacagtcagttcctaaactgtgagaggtaattccaatctacttaaaagagttgtaattttgtaaaatagaaattccaaaaatacttcaaaaggttacattatattatcaacagaagtttgacataccacatgaattatgagatgggaaaatgaaaaaatatggggacagtgaatgcaccaactagcatttacgaaacacacacagcttgctaggcattaggcttagggctatgagcccattgaatatgtgaagtttaactaaaaatcaaaatgtttatataatagataaatgttagattctttttttttttttttttttttttttttgagacggagtctcgctctgtcgcccaggtcggactgcggactgcagtggcgcaatctcggctcactgcaagctccgcttcccgggttcacgccattctcctgcctcagcctcccgagtagctgggactacaggcgcccgccaccgtgcccggctaattttttgtatttttagtagagacggggtttcaccttgaaatgttagattcttacatgagtatgttttcataaaacaaactacacactgtcactgtccagattcaatgggttcccaaaaacataacagcctgagagtcttagttgtgtcattgccttattcaatgtaataattattgcttgtaaaaatgttttaatccagtgataatccagatttagtactttcttccatcttggtgtattttatttattgctcatgctctattggggagcttacatgggatgttagttggcactttctgattactttatttaaaatagaaaaacatttcagaaagacatggttgtagagggtaactagcagagcctcatttgatgtctcctgttgagttacctgaagggagatgctcagaggaagagttgcatgcagaaggcctcctgggagtgtattctcaagagagacatcagcaagggtgtgaggaaggcagaatgagtggagggagaagcttctctgcaaagctctgatgatagcggtctcaggtgggatgcaccttcagcattgttgcaacttaacacgagggggccaggcttgtggagccacctttgaccagtcattccctgcaggcctcagacaaggcagttccctgtaacttgggctggttcccagtgtaggactcaacataggatctttccagctgctttggggcagggtgcattggcgctaaagaggaaatctgaagggagccccacagtgtccaccaagtggcagcagggaagaacatgctgtgagtagagtcaaccacatctattcagccttgtgccaatgcttggatgctgtgcttcctaacagcagggtggagaccacccgctaccctcacatttagtgagcaggttaaatcttattattataagatgagtccaatcacctttgtaaatagtgttaatttcttcatctctttcttaccaaatcatgtcagttaactacaggcaaagtgaggggctcatgtattttatcacatagacttagtagcaaccccagcacatagcaggagcctgtaacccctcagctccacaccacggagaaagactagatctggaagcacaggccatagacccactctatacagagctgcctgtaatccccacacaaatgaggggggactgttatgccacatttggttctaagatgagaaaacaaaaatctcaaaagccttcatcagaaagactgaatctagttctgccacctcctagccctgcgttcttgctcaagtgacagcctgtatcctgtgtccttggtcaagtgacagccctgtgaatctccatgtcaccgtctgcaaagtggagcctttgtttacctagcggagctgttgttcatctcgagtgttagaaggttgtctggtatgagatactatgaagcatacaataaatgttattctcacttctgaccagtgaagttcattcgaaatatctggggcttctcttctctcttacaaatatgtaactaggtatgcacctgctttagaaagtcatggagaagctcagatgtgtgacaagtaggccttcattatatttataaatcttttatttaacttgtaaattctggaagtcacgttttatttcttcacataaccaacactccagaaacacttgttataggcccttaaatgaattaaaaagccaaatgtgtatgaacacatttgatgatatttacttgtagaagcgaaaagagaaacaatttaaatgaaaagagcagaaaaacagttcataagaatatgtataaattgtgcattcactgatatttacttgtgaagtccgtatagaaccatggaataatgtagatgatgtataaaagaattaaacagttataaaaatggtacattttacgtatgtacactttaacatgatataattatatagataaggcatggaggcaggtggaccacaagggaaatgtaaaaatcaaaacagacactgtaggctggtggagttgagtcatgcttttgtcaaaattctctttattgttatgtcctattttaaataaaagtgtattgttgatttgacattgtattttctgataatggtgcttttttaacatgctttactctacaaagaacttaaatttacaagaaaaaaaaccccatcaaaaagtgggcaaatgatataaacagactcttctcaaaagaagacatttatgcagccaacaaacgtgaaaaaaagctcatcatcactggtattagagaaatgcaaatcaaagccacaatgagataccatctcatgccagttagaatggtgaccattaaaaagtcaggaaacaacagatgctggagaggatgtggagaaataggaacgctttaacactgttggtgggagtgtaaattagttcaaccattgtggaagacagtgtggagattcctcaaggatctagaaccagaaataccagttgacccagcaatcccattactgggtatacacccaaaagattataaattattgtactataaagacacatgcacacatatgtttattgtggcactattcacaatagcaaagacttggaaccaacccaaatgcccatcaatgatagactggataaagaaaatgtggcacatacacaccatggaatactatgcagccataaaaaacgatgagttcatatcctttgcagggatgtagatgaagctggaaaccatcattctcaacaaactaacacaggaacagaaaagcaaacaccgcgtgttctcactcataagtgggagttgaacaatgagaacacgtggacacagggaggggaacatcacacaccggggcctgttggggttggggaactaggggagggatagcattaggagaaatacctaatgtagatgacgggttgatgggtgcagcaaaccaccacggcacgtgtatacctatgtgacaaacctgcacattctgcacatgtatcccagaacttaaagtataataaaaaataaaatgttttacatatgatttgcaattttaattaaaaatgtggcaaatttcattgcataataaccctcagtgaagctagtaaagagagcaatttgatcccagcaacaagatctaggcattcacacattcagcttccctttactgagagtccagtgagagctgggctctatgctccaggtaatagtgggagtaaattaagaccttgtcctcatgaggcttatctctagtggcagaagatagacaataagtgaatataaaatatatacagtccaatggtggtcagtgtggggagagaacagggtttggggcatgaggcaaaaaaacaatctattaaaaattaacatccaggataacttaacagtttgtgtacaaaatgtgaaattaggatggtgccttattttttagtatcagcctgtctgctcacagcattttcagaaaatttgaattatttggttttatttgagcctgcgcctcatgattaattttcaggataactttctgaggccagacattgaactgcaaatgtcaaaggcatgttttactcacctatggatccctgtgttgtcttcttgcagttttcagtgaagacctacactccagcctctactttgtcaatgcatctctgcaagaggtagtgtttgccagcaccacggggactctggtgccctgccccgcagcaggcatccctcctgtgactctcagatggtacctagccacgggcgaggagatctacgatgtccccgggatccgccacgtccaccccaacggcactctccaaattttccccttccctccttcaagcttcagtaccttaatccatgataatacttattattgcacagctgaaaatccttcagggaaaattagaagtcaggatgtccacatcaaggctggtgagtacagctctgggctttgttttttctgtgcctgcttgggatgggaggataatgacaatgacacatagcaaaatgccatcacagcagagaaccaatgaaaaccccatcatcagttcattctgaccttgctgatgacttctttaaggtctccttgtttagatttcaaagtgccttacattgttggaactaaaccttgaaagaaagcagtgattagcaagttggcaagttctaacatcccagcctccttatattttgtctaatttgatactctaattcaaattttcagtgtctcaaacccaatgtgtttgcttccacccctccttttttcccacttgcccttcccctaccccatcctaggggaggagaaagagagagaaaaaaatgacaaatggttgagctggaataaaaccatagcatcaagatgtactgttatggaaacagaatcaatctaatatccttgctttccttgtgaaatagaaaggctattttaacatttttgactgtatcacatgttgctgaaatgttgtcagtacataaatcctgaatgggctatgttccttttaacaacatattgtgtctttttttaatcaccattgctacaagtcaacccaggaaagaatactgcctgagatacacagacatcaagggctatatatacaggacagattgtgtggttctatagatttaacaaagccctgcaaaacaaactcacagctagactcctgttagcaaacagcattttaatttttttaagtctagctctgaaatacttgtgtagactgacataatataatagcagggcaaagagaatgtgactttgatttttttcttatacaccaggtagctgggggagctttgcaataatttcttcagtaagtgagtaggtgctggtagaagacatcacaacatgagaaaaatatgaggtgtttctgaattcctgcatatgatctctttgatgtaagccatcaaacattagactatgactcatgctgctagctagtcattttcccaactatattttgatctttgtgacatgctcatgaattccaagacctgcatgagaattcacataagaaagaaaaaaaggattgtctttaatcaagatatatgaaaatttgatgtgtcaaataattacaatgcaatttgtatagggacctctaaacctgacaaacagggagatacagtgaatgacttttactgggaagactgcacattttaatgatgtgttataaaagcgtatttataatctgcaaaacaccacttatagggaaacctagaatttcaaacagctccatctgtgcgtattaatccattatgtctgccttggattttctgtcagataaaggaatgaaatgcttactcctgttttaactatcatcttctaaattagtcatagaattcattgtttttgcatgacactgaaagttttagagcatggacattgcatcatcttgtctggcgtctgtgctacctgcctcttcctacccagttgtgcttttactatttatgtgctggcgttcttgacatctgaaaccctatggactatgaatccagcatatggatgactactgtatcagtttgaacatataagatgggcagtcatattacccaaatcaaatttctctcctgatttcattttgctttttattgtgaacacataatggttataataatcttttaggttgttcactggatacttgaaaatcttttttcatcctgtttatgtaaatatgagtacagaactggaagcttgttcaaaaagacagatgaagggcataaatgctaccctttgacagctgaagggtaggtttgagggtgatgactgctcactcacggggtatcctcttctgtatcaggtcatcctaaatgtctaaatatccctgtagattggtgtttggattttcctggaataagctattaggtagaatgacttcataatctttcccttggcagcacaagggattctcattcttaaatttcagaaattttgacctaggtctgggtgctagcaattgaaggaaggtttactcatcatgtctcattaatcatcaatcctagtcctaacataagatattttcttgcctgttctaagggctggaatgcaggtgggccacttcagacagtattgctccttacccaggctgcctttgctacagagcaagtagcaatgagccgcctgatcctgggcaagtcagaagatttctcatgattgttttctccttagcagactgtgctttctttctttctttctttcttttttttttttttttgagactggagtctcgctctgtttcccaggctggagtgcagtcgcgcgatctcggctcactgcaagctccacctcccgggttcacgccgttttcctgcccagcctccagagtagctgggactacaggcacccgccaccacacccagctaacttttttgtattttcagtagagatggggtttcaccgtgttagccaggatggtctccatctcctgacctcgtgatctgcccacctcggcctcccaaagtgctgggattacaggcatgagcgaccccggccacaaactgctttctaacatttgactaggacttttgcttgtggccgagatggaggtgtgggagccacatttacccttttatctgaaacaaccaaaaaccagtgtcctgaggctgatagggtttaactctatgtccgcacccaaatctcatcttgaatgataatccccataatccccatgggtcctgggagggacccagtggaaggtcattgaatcatggggtaagtttcccccattctgttctcgtgagagtgagtgagtctcacgagatctgatggttttataagcatctggcacttccgttgcttgcattcattctctctcctgccaccctgtgaagaggtgccttatgccatgattgtacgtttcctgaggcctccccaggcagttgaaactgtgagttaattaaacctcttttctttataaattgcccagtcttgggtatttcttcatagcagtgtgagaatggactaatacaaccaactgaaaaaaaacaacgaaaaatgcagacaaaatatctgaagcaaccattttcaagactggacctcaggcagtagaggaaagcattccttaaggagctggaaataagatgtgtcctatgcttgccttatgctttgggataaagaatatcaaaatctgcacataaatttgtatagcaactttattcctaattgccaaaacatggaagcaacaaagatgttgtttagtatgtgagtggatggggataaagaatctctccttgactaactttggaaaggctcctctgagccctcctctcaactagttctcaaccttagcttttcacatctggtctcttgtccccagctttagcaagaatcctgctaaatcatccccttactcttgatacttgatcactcttaatatctgatcaagttcttccagtcccatctttgatgtatacatgtttggcctgattttagcaagaatctgttaggccagtttagcaagaatcctcatcccttgatgtctcctctttctaattttccacccactgctcccctcactgtgttcattggctataaaccctcacttatccttgttgaatatgaagttgaattacccttccctgttgcagtcatcatagatgactcctactggaacagacatgaatataatcttatctttttaataagtgttagaacatttttttctgttctttaatatttttgagaggacatctccctctcttgtccaggtcggagtgcagtgatgggatcgtggctcactgcagcctcaacttctgggctcaggtgattcccctcagcctcccaagtagctgcggctacaggcataagtcaccacacctggctaattctttaaaaaaaaaaattttgtagagggtattctcactatgttacccaggccggtctcaaatttctgggctcaagccatctgcctgcctcagcttcccaaagtgttgggattacaggaatgagccacagggcccagctacaatttttctttaacattagacaaattatagtataaaatgaagtattagtcagcgatagaaaaaatgtgctatcaagctatgaaaagatatgggggaaatttaaatgcctgttactaagtgaaagaagccagtctggaaaagcaacatagtatacccttccacctacttgacattctggaagagataaactagagagacagtagaaagatcagtagtttccaggggatagtcaggagggagggagggttgaacagacggagcacaggggatttttttagggcagtgaaactgttctgtatgatactgtaatggtgatacctgccattatgcatagaacttacaacatagagtgaaacttagtgtgaactatggactttagttaataataataatgtataaatatgagtttattgtcacaaatgtatcacattaatgcaagatgataataatgaaagaaattaaaggatgtggcaagagggagaatatgggaacctgctgtgaacttttctctaaacctacaactgctctaaaaaaaaatcaagctttattcaaaaaaattaaaacatgcttcaggaagcttaatgacaaattaagccccaagggaagggatggtgaaatttaaaaagaagtggaaaaatgcaggccaaaattttccaaatttgttgaaaactataaacccacagatccaaggagctcaacaaaccccaagctcaagacacgtgaagaaaaaatgcacaaaggcacatcataatataataaaattgctcagcgcaataataaaatatcaaaagcagctacagaagaaaggcatattacacacaaaggaacaaagataagaatgacagtagacaggatttttgttgttgctgttgggtgtgtgtgtgtgtggatgtgtgtatatgtgtgttttatgagacagggccttgctctgtcaaccaggctggggtgcagtggggtgatcatcgctcactgcagcctcagcttccctggctcaagtgatcctcccatctcagcctcccaagtagctgggaccagaggtgcatgccgccacatcaggctgatttttatttttatttttgtagagatggaatctcgctatgttgcccaggatggtcgctaactcctgggctcaagaagttgccctgccttggcctcccaaagtgctaggattacaggcaagagtggaagtaaatttataaaataatggtgagatgaaggctttctcagacacaaaatagcagaaaatttatcatcagctgaatcctactacaagaaatcttaaaggaagttctagaatcagaagaaaaaaatgacacctgatcaaatcttagatctactcaaaggaaagaactgcaatgaaaatggtaactacatgagtatctaaatcagattttttaaaaaattgcaatattttaaaaaataattggctatttagacaaaaatagtaacaatgtcttaggtagtttgtaacataggcagaagtaaaacttatagcaacaatagcattaaggcctacagtgaagacatgggagtgtaatattggaggttattttgctatatgtgaagttgtgtaatgtcacctgaatatagatggtgataagttacaaatgtatactacaaaacctaaagcaacctctaaaataacaaaacagagttatagctaataagcccacaaaggagaaaaaatagaatcattaaaaaatcctcaatccaaaacaaagaagaaaatgataagaaaaaggaaacacggtaaaaaaaaaatacatatcaaatagcaaaatgataaacctaaccgtatcaatatccacattaaatttaaatgttccagtaacctgaattataaggcagaaattgccagattggatttaacactgcttaaaagaaacattctttaaatacaaaggcacaaatagcttaaaagtaaaaggataaaaatgatataccatcctcatcaaatcaaatcaacctaattaaagtaaaccactgaaagaaagctagaatagccacattaatattaagcaaagtgtatttccaaacaaatacactgtttgctcagagcatcttgcattagtgtgatacatttgtgacaataagctcgtatttatacattattattaactgaagtccatagttcacattaaatttcactctatgttgtaagttgtatgcataatggcaggtatcaccattacagtatcataaagaacagtttcactgccctaaaaatcccctgtgctcagagctaaagcagttcatttcataatgtaaaggggggaggtgaagaggatatgactattgtaaatgtttatgtacccaacaacaaaacttcaaaatacataaagtaaaaatggatagaactgcaatgagaatcagacatatcaaaaattatagccggagatttcaatactcctagttcaataattggtagaagtagacagaaaatcagtaagaacaaaaaaacacgtgaatgacactatcaatcaatttgatgtaattgacctttaaataaagaacattctatccaacaacagcacaatataaattctcttctgagacacacagacatttactaatatagaccatactcagagcaacaaaacaaatctcagataaatttgttttaaattcaagttgtataaaatatgttgtttgatcataatgaaattaaatcactaacaataacatctctgagaaataaccaagtacctgaatactgaatagcactcttttaaatgatctgtgtcaaaaaaaaaaattcagaaaaaaatttgaagaaggaaattagaaagttttttcaactgaataagaaatgaacacacaatatatatgaatttggggagtgccactaaaaaaatagggagattttattgctctaaaaaacttatattagaaatttttaaaaaagtcttaaatagtggtctcagcatccattttaaactgaaaaagaggataaaactaaaactataagcagaaagcaaacaatgaagatcagaatggagatcaataaattatagaacagaaagaaacaatagaggaaatctatgaaactaaaagttcttttaaaaaaattgttaaaattggtgtgtttttcaccagaaaagtgagagagttggtaaatgactaataccaagaatgagggagataacgtcactttatcttctacaggtattaaaatgatactaagagaacattaagaaaagtagatgaaataaaatattttttgagaaacacaaactatcaagactcactcaaggaaaaacagataaactgaatagccctatatctattaaagaatttaaatttattggtaaaaattctctacagtaaaattcctggctcaaatggcttcactattgaattctactaatcctttaagaaagaaataataattttggccaggcacagtggctcatgcctgtaatcccagcacttttgggagaccaaggcaggagaatcacttgaagtcaggagttcaagaccagcccggccaacatggtgaaaatccatctctactagaaacacaaaaatcagtcaagtgtggtgacacatgcctttagtcccagctacttgggagactgagacaggagaattgcttgaacccaggaggcgaaggttacagtaagccaagattgtgccactgcattccagcctgtgtgacagagtgagggagactccatctcaaaaaaaaaaaaaaagaaagaaagaaagaataaaaattataaacaaattcttccagaaaattgaggagagagtatttcccaaatcattttatgaagttagcattaccctaatacataaacaagacataagaaaactaaagacaagtatctcttctgactatacatgtaaaaattctaaaaatttaacaaattgaatccaacaacatataaaaggaataatacattatgaccacaaaggcttatattcataatgcaaggtgagtttcacatttgaaaattaatcagtgtaaaccatgtgatcatttcaacagacacagaaaaacattgatgaaacccaacatccactaatgattaaaagaactctcagaaaaccatcagtagaaaggaacttcctcaatctgataaaaagcaactacgaaaatcctgctatagcgaacatcatacttgtcaaagatgaaatgttttcacccccaaatgaagaacaatatcaaagtgtatgctctcaccacttctattctacatcgtcctggaggttctatcctgtgcaacatgacatgctataagaagatgtgctgtgacccagaccttcttgttttatttctagagcataggcaaagtagatttgtcataattaattctaagaaataattttagaattattgaaatggtaaatgagcattgacttcatcttagtcatcagctgcattaacccttaacaagaatcagcttgttttttgaagcattgaggctaggcattgacttctcctctctagctatgaaaatcctggatggcattttcttttaatagaaggatatcttctgtacattgaaaatatattgtttagggcagccaccttcatcattgacattagctggagcttctagataacctgctgcagtttctccatcaacacttgctgcttcaccatgcatttgtatgttataaagattgcttctttctttaaatctcagtagccaacctctgctagcttccagtgtttcttctgcagctttcccacccctctaagcctccctggaattgaagagagctaaggacttagtttgatttaggctttcgcttaaggcaatgttgtggctagtttaatcatctctccagatcttctatctactcaaattttctccacaccaccagtaaggtagtttcactttcttatcatttgttcgctgaagtagcacttttcatttccttcaagaacttttcctatgcatttacaactcggctaaatgcacaaaaggcctagctttcagcctgtcttagcttttgatatgccttcatcactaagtttaatcatttctagattttgatttaaagtaagagatatgagaccatttctttcacatgaatacttaaagaccactgtagggttatttattgatttaatttcagtattgttgtgtctcaaaaaaagggatgcttcaggagagggagaaagacggaaaatggcatgtcagtgaggtgggcagagcacatatgacctgtattgattaagtttgctatcttctgtaaatgtggtttgtggctccgcaaaacaattacaatagtaatatcaaagatcactgatcaatgatcaccgtaacagatataatgattttaaaagtttgaaatattgtaagcattaccaaaatgtgacacagagacacaaagtgagttcatgctgctggaaaaatggtgctgatagagttgcatgatgcagggtttccacaaatcttcaacttgtaaaaaacataatctctccgaagtacaataaaatgagtatttcatgtgagaaacgcacatacagccatccagatgcaaagaatggactcagagacacgaagaacagcagaagcgactctttttttttttttttttttttttttaagacggattctcgctctgtcgcccaggctggagtgcattggcgcaatctcagctcactgcaacctctgcctcccgggttcaagtgattctcctgcctcagccgcactagtagctgggattacaggcatgcgccaccacgcctggctaatttttgtatttttagtaaaaatggggtttcaccatgttggccaggctggtcttgaactcctgacctcaggtgatctgcccacctcggcctcacaaagtgctgggattacagatgtgagccactgcacccagcctaagcaagacttttgatgcaagatcaggcgcctgttaggcaggcacacccagggcaggtagagcaggtaatttattgcctagcaagcaagtccctcccccagttcctcattgattgagtactatggagttacaatcttcctggacatcgcctaagtttcattatcccccttttaaagttataacccaatccccttccccacttaagttttgatttcccagtaacaaaactttcttcccttttatgggctgacccctcgtctacattctgtttgcttatcgtgaccttctaggtgcatgagccatgcaatttgttacatctgcaggctggctgccagtgcttagatttattatgccttgaaaatggaccatttaaaatgttttctcacattcgctgctgtcaatgtagaccaaccgtgtgatctcttgctcaataaataagccatgtgtgtgtaatcaaagtaaagttgatttcagttttaaataacttcttataactataagatgcttttcgtaagcttcatggtaaccacaaagtaaaaacctatagtagatatgctaaaaatataaagaagtatgaaagaaattgaagaggacacacacacacaaaatggaaagttatttcatgctcgttgattggaagaattaatagtgttaaaatatctatactactcaaagtgatctacagattcaaggccatccctaccaatgacattcttcacagaaatagaaaaaaaaatccttaactttgtatgaaaccacaaaagactccgaaatgctaaagcaatcctgagcaaaaagaacaaagctgtaggtatcacacagtctaatttcaaagaatacaacacaggtgtagtactggcatactatagcatagtactgacataaaacagacacatagaccaatgggatagaatagagaatccaaatataagtccatgcgcttatacccaaatcatttttgacaaaggtaccatgaacacacattcaggaaagggcaagctctttaaaaattagtgttggcaaaactgggtatctatatgcaaaagaatgaaactagatccctgtctttaactgtgtatgaaaatcaactcaaagtgggcaaaatacttaaactaagtcttgaaactatgaaattactgaaagaaaacactagggaaacactatagaaaattagtctgggcaaagatttttggggtaaggcctcaaaagcacaggcaacaaaagcaaaaatagacaaataggattacatcaagcagaaaaactctgcacagcaaagaaaataaaaatcagcaaagttgaagagacaacatgcagaatggggagactattaatatttgcaaactctccatccaacaagaatataatgatggatgaaactggaggttgctatgctaagtgaattaagccaggctcagacagacacacattacatgttttcactcacatatgggatctggaaaagtggatcttatggaggtggagagtggaatggtggataccagaggctgggaagcaaggggatgaggagaggggttaaagagtagttggctgaggggtataaaaatacagttaaatagaaggaatatgttctaacatttgctggcacagtagggaaattatagttaataatttattgtatatttttaaattgctagaagaaaaaagatttactgtgctcccaacacagggaaaagattgaagtgattgatattccaattaccctgattttatgattatacattttatacaggtatgaaaacatcacatgtaccccagaatatgtacaactcttatatcacaatgaaaatatttgattaaaaaaataaataggcctgattttgtttcaaagtcatattaccagagatttttttttcttctgatctaaaaagatgacagattttactgaatgaaggctaaaatgattgcagtggaccctactggcatccctgaatcagatcccccaagatctgcgcgctggttgctaagaacatgaacctgcagccttcagaggattgcttgggcactggaaccattcacagaaacaagagtgggaaatgcctgggagttccatcctcctgaggccagccctaagccaatgacagacagctacaacaggggatcccagctcctctgcatgaccgagcatgtcaggtgtggctgggacttcacctgaaaccacacacctgctttgctgcttccctccctgccctactcacactttccctgcctctcaggggattgtgtccttgctcagtcgcttgaacccagctcctccttttggggtcgaataaggagaagggatggggagtgtgcagttttcttctgatccccgttctctctgagcgagctggggttcagagcaccacagtgctgtccctgctttgagaagatctgggctctctggggagagcctaacttatgacaccaagcacagtacttagataatactctgtcttataatgcaaatgtcaatcaaatttaaaacaaagtgtatttttttttttgcctgcatctcaggtttctagcccagtgtctgttactgcaacaaagttagcagtagttggatgtagaatgaagatcaaggctgcacccctgtcttcggggctgactatgggctcaggaaactcacatggccctctgagagatatatcgccatagacagcaatgttggtgtcttaagttatggaggcctcaggaacaaacaatgctctattacaaagattaggagctttaataaaaccctgatttgcatttttttaaaaaactatagatagtggctataaattcaaatgtgcatacatgtatattctgtaaaaggattagaagttctcccagaatggaagctctgtctttctatatattcagtctcaaaatatgtattgaacacctcttgtgtgccaagtattttctaagataattttttaaaggctcactgcacaggctatctttgtggaatgagtaatcgaataaggagaagggatggggagtgtgcagttttcttctgatccccattccctttgagcgagctggggttcagatcaccacagtgctgtccctgctttgagaagatctgggcttcttgggactgacctggaggttggagaagcaaaagtcacacaggtttaaaattgtgactactaaggtgtcctggtactggtgagggcagtgggtagctagagaggagaaaactccatgatatgtgggtaagtgctgggactgaggggtttcctaggacactggacattgggtggtaacactgggaatgtccccggtcagtcaccccatatttttatggctcctgtgatcccatctagtgtaggctgtacacctggtgggaaggcatttcccgtgtctcccggtaaacaggtgaacatcttttcttctcactttcctgtctgatacatggaacttgacccctttccttgatttctattaaaaattatcctacttgagtcattaatgtttgaagcaaagtctgcggaaggtttggggagacagagtgattttattgcaaagaaacaagcatcacacagacaaaggagcttaaattgaaatcattcccctgcttaggggcactattcctgtgacggtagactctctctgttgaccagtccctctttctcctctgtcctccatcctcctcttctcctctctgtcttctgcttctcaccatgcccagattctcaccaatgagtttgattagtttgcctatatcttcatagtctttttctaatctattaccgtagacctcagctcccagcaaaggtttacttatgcaggagcctttctgtacaaagtcagttccctcctctcggtgtaaggatgttgttgctgaggtcagtctcttgggcgccctgaatttttgcctagtggacctcctgcaggaggtgtggagttgctgcctggaccttcacctcatgccgcttggggattacagtgatgggggtcgcagaagatttcaatacttggaaaaatctctctggttagatacaataatgaagaaattctccaagttggggaaaaacggctaatgttaaaaatggaaactggagaggaaggctttcatgaaagacatgctttactacaaaaatgctcagcatatcacaaggttagcccgaccttaacagtcctcttctaaagagctcacctctgcctactgggagatttcccttgagaaattcacctttagctttgttggtgtgttagtaccttttgaaaccattttcatggcacatatttgtccagtaagtgattaattctttaagtgaggtggttagatgattagacaataagttatctctgtgggtatcttagaaaatcatagacttataagatttagaccttgaagaggttcccaccacaatgccctcattttaaatttgaggaaaacaaagctctaaagaagtaaggctggcacatctaattgggactatattcatcagtgtcttacttccctggagacagatcttccccaaccctggggatccatctctggctattggtaagtgtggccttacccaacctgcttctagcagacactgttgaattttcacctacgttaactgattcaccacagtcaccctagggggcagatgctaccaacatcatccccatggtatagatggtgagaggatttgctcactgccccacagtcagggagtggccgagcttggatttgaacccagggagttgggcctgctaggtaggttttgaacaccagtaccaccctgcctctgagcctagacatcaaggacgtggaagtccactctgcagtctttctgggatgctcctatcattggagtgtttgggcaggctgtctaatcaacatccttccctaaacaatgggaagcaggatcagtgtttcccaaactgctttgcaactgtcatttaaaaatttactaatgaaaaattattttaattgtctcagagttctcaaggcttcccagaaaaattgccttgcctgaattttttattcattttttgcagtcagaaaaaaaaatcttcctcggcccttagaggactaatagcagtttgccatcatcataactttgcagagccagtaacttttctttcatgaagctatttcctatctcatgataccttcagggggtctattaactattttcgattatactctggccccttggtataaagtgtagtgtatttttttttcttcacccaggctgggtgcagtgatatgattatagctcactgcagcctcaacctcccaggctcaggtaatctcatctcagcctcccaagtagctgggactacaatcacacaccaccatgcccagcaatttttttgtatttttagtagagatggggtgttgccatgttgcccagtctggtcttgaactcctgggcacaagggatctacccatcttggcctcccaaagtggtgggattacaggcatgagccaccttacccagctatgtattgttaagggaatgaatgttttcttaagtcaggcgatgaaagacgtgaaatgtaggcatcttaactgttttccagaaagatatgttatgcaattgatgtgtgtgtgctgcagtgtatatattacagtgagatactctcagaatgagcctgttgaccgtgtgccttactgacgtcctctttctgccttccagttttacgggagccctatacagtccgtgtggaggaccagaaaaccatgagaggcaatgttgcggtcttcaagtgcattatcccctcctcggtggaggcgtacatcactgtcgtctcatgggagaaagacactgtttcacttgtctcaggtaggctttgcgtctccagggtgcaggacaccacgctcaccttctgaaaaggttatttcagagatggaatcgggtctccgtttatgtgttcatcataattcagaattagtattcttaaggctgatgctattttgtaagtaaacctgaaataagtgttttgtattggcttataatggcttgattcagacatcctttggtgggttgactgatgaagagagattagttaccggcactgtaactgtagccattgtgttaacttttttgagaaaattgtggttttacgtctgcttctaaaaacaaggtagtagtattttgcatctgtgagagacctcagcattgcatatatagctgacattctgaaactaaaatctggaaaatggaagccctgttttcatgaccttttggtgctttccaatgtcttgagagttatgttgtatctctgacctatttcttgaagattctactaagaatatatatgtagcaatgaaatgtatatttgcatatgaataatttcttggcttatatttggtgtgtagaaaagacaaaatttaaatttagcctccaagaaactgcagttcttcatttctaatggtgttgatttcttgctctgtgctatttacctggaaaggcgactgtccgcgtgatgcatggtgctcctgttcttacatccttggataatgactgttggcatatctcaaaatgtgttggctgctttcggaaaagaattgtgaggagcatagtctgtgttccgatgtggattataaatagttgccttttttagacatgtctgtatgccctcacatgcgggtgcacacacgcacaacacacatgttaacagacttcttgactaagcaacattttatccatttatagagagcagaatttggaactaaaccctcacggtgacacaccgtttttgtttctcagcttattgattagctagagaggttggttactgtacaccaccaccagaggcatttaaaagatccaaatcaaagttgaaatacattgccatcatagcacattacaggaatctaggatagaatggaattcttagtttttatgaaaacattgtctttacagtgaattcaaaacccctcacacttcaatgaacagtacattccttgctgttatgttgattaattatcataatttaacttagggtgttgaaaaatactaagcttaataactcaaatgcgattgtaataatcagaatagagactcccttatacatttttatttgctaattttcagtgttgaaacatcttcatcttctctccttaggggtcatgttagttgtcttaatggcaaatggaaggatttgatgacagtcatctggctaagctcggaatcaaaggggagaggccctccaatttatatggcaagggagtataggttcagggagtggaagaattgggagctaccttttcaatcttccggactcggtgacctaggatagagacttcaccatcttttaaccctgtcatccaaattttcagcttcatggtctgctctggcagaggaagagagcatgggagaattacaaacgccttcttagtgcttccacttggaggtgacacatgttatctctgttcatatttaattggccaaagcaagtctcatggccatgcctgacctcaatggggcatgtgcctgaaggaagaggagaactggaaatctgggtgagaaattgaaatatctaccaggaggatttttttaacttttattttaagttcaggggtacatgtgcaggttttttacacaggtaaacttgtgtcatgggggtttgttgtacagattatttcatcacccaggtgttaagcctaatacccattaattatttttcctgatcctcttccttctcccaccctccaccccgaagtaggccccagtgtgtgttgttcttctctatgtgtccctgtgttctcatcattcagctcccacttacaagtgagaacatgttctaccaggaggatttttgaatctctttggttatgcataatacgtgtgttcttttgtttttagacatctttaattagcagcatcctcattgttcttgtttcacctttttgcaatctctgtgaacagactttattttccttcaaatgtgaacctaactaaataaaaaaaaggaaatgtgtatctagtgaggggatgatgctggcatgcaatatagaatttatgcccctctgataggaactgttaaagcccatgtcctctcctcagtcagatactggagcttcatcctttcatacaattttaaatgcaaaagttttggagaagtgcttggtttgtacttcacaacagcatctagaaaataaatacaacacaggtgtttatcttattaaggaatacatcagtaagaagctttggttggtttgtaagtaaatcactgaaagaaagggagagagagacttcatatcaggtcgttcaacctgagtcgaatagacttgtcactaaaaatgaccttgtaaatgacaacaaggccccaaagcagtggcatgatctgctaatagaaagtctggaaattgagcattttacctgacttctgttgctcactgctacagtcagaccctgttcccagtgtctgagctccacccatcagcaatgcccagaaaaggaggtcatgaagtcactggaggtgacgcatggtttaaaacattggagatcttaataaataaaccatgctcaggaggtttaggtggagaagggttatatttctctctggttaccagcacaaggcacagataaggacagaggacagcctccctcccccatcacccaggctgtgccggggtggaggccgctaaaaggaagaccctccctccctccacactggctggggctgagccactccagggaagcactgggattcttggcttcagggaacgaccttgcatagcacagaagtcccaggaacagagggactttttctaaattagccctgaccttcagggaagctgtcctgaatgccatatgcacagcagatgacctgtaaaaggttaatttgtctctgctttgtatataaactgtaactcctgcgagctagtttggatttattccttggcatggccatctcccaggtccctcttcccggattatcaagtcatcccagcctgctgggatctggctgggaagtttgttccaggaagcattcgtactctgcagagatcacttccttcagtggttgattctttccatggagaaaagcgattaactaaatcagccatggaaataagcctgtgtaagtatcttactaagtgagtgagttaggagcaggtatgggagtgccagagagttgacctaggatagctgagagctgatggcagtcaagagagggcccaaaagcatgattcacaggccatggcccaacgtgccccactgggctcagggcgaagtgtgacctgtcagcctgggggatgcttagctgctcagccttgactgttgggagatcccctgggaaggtcggagcagcaaagacctgcttctaacagatgagctttgggtttctgtgaatctctaggccaggggacctttggaaatcctggtgaaggtaaatgggtatttgtcttctacaaattcttttttaatgaaaagcaaaattaaagatgtttgtgtatttccctaaaaagaagcaaaatggtttctattagtatgtctcactaggttttgccctttattttggttaagaaaacaaatgagtagtttattttcctgagaagcacaaatgcagtgtttgtcagggtttaatgagtgttgtgcatattgtcatggttccttttgggagcttactgcacattagggcctgcattgatttctttccaggacaggcttcggttggcctgaaggtagacgcaggaatcaagttatgcctcttcatcatatgaggccatgaggctaccattatcaaggacattaatgagttcattgatttggagtgacctttggaaagaataccccaacagctgaaaagtagaaatcccataattctaccaaatggaggaaagattcataatatctgatgttgcttttctgcctgcctgagctcttccctgggccctggggccttacagggtgacccttccctctggtatgatggatgggggtggggtcgtaaatgtgcagaggaaaagcatttcagagacaggcacacaaggtgccatcagatgacctcagttaatatgacagatcctgacctattgtgttcttacctccctaaaatgagccaggaagaacaagagtcatgatgtctatgtggatttttttagacatcctcatcacttatcctaagctgcaatgaaatccttttaaatgccataatattaatgtagcccagtaaaaatatagtagcttgaataatgacatgcttttggaggtactgctgatgtggagatacataaaacaccatcctggaaaaaaacaataacaccggctttatatttgggtttcccttcacaagcctgttgtgaatttcctcccgattagggaggccagcagtaagagagcccagccttccgtttctgtttcttctgataaaattgtgagaatctcaccaggggtttagctacattaacatcaaagacacagcccaggggtaaccggatttggaaaatggaaaaagcaaacattttactattcccagagaaactgcctccctctttagcagtggcccaattttctgctgtaatatttcctatctgaatacctctattagtgatgattcaaggagaattttacctcttaggatcattgagttcaggtcgaaggatgattatcttctttctgtattttggctaaacgtgaacaattttctgcccacatgaaatatcaaaggacataaaccaaccactttacatgaaacattggctgtaattcttcactgccacaactgggtctgggcatcatagatcacgcaagacttgggctttaagaagcactccctccccaggcccctgcagagatggtttctgctgttgagatgcttggggagattcctgcactgtccctcttggggtgttaagtgctgcagtaggcgcttagggcctgaggctgtagctacacacacggttttgcctggggaagtagagaaggtttcagaaaggaggttgtgatttaagaaaacctttgcattttagagaggggaaaagagattataggtacagccaaccaaattagacaaggctgcccttaagcacgtttcagcaaaccagaactaagagcagattggatgccgtattctcatgtggggagggagggagagctagcacagctgtcggggggacctgagggtcatgctgtggggggcctctgctttgtgcactcttgactatagaagttaaccttccctttctgtggcacttctattgtgattttattgctcctcactgagcattttccagacatctgctatgctgtggctgctatcttgcggagacctgagtctgccctcaaagagcttatgagtaaaaggaatgagataaacattaaaataatgtgaaatttaaaaaaaacctagagtcacctgaaagcctcatctttgattttaaaagtgccagagagttgcagaattaaagaagcatttctttaacattcactgaaaagaaattcgtgggaccaaatgaaaagtataaaaggaacatttttctgtctgttatcatctacctagctatctgtctttgtatgtatcatctaatcttctatttatattgcttttagtaaataagaacctcattttaaacactggaaagtattctcagctcagaacgtgcacatcagactggaattagaaaggcacagagatgtcatgtttttaccatgctatatttttgggagtgaattaactgagaaataggaagagagggccctggtctctttctttttaaaaatcattaattatgttatactttttccatttaagtctatcgctcactaaattaggttttgcatgttaccccgctgccacctgaaagtaattaaaagctggttgtttacagctctggagagcccctgtgtgacaccaagaatgggggtcgtgtaaggcgaggggcacagcctgagtctccaaacagctgccagcaaggctccaaagcagccacaatagcagctagtctgcagggcctcagcctgccaggaggagacctgcacccattctgaaagctgcaaactgtgtattgtggagtacaacccaacacagagaagtacgcttttgacttttgaactaccaaaacaagtagatagacacatagagataggtatgttaatattttttctttaaaaaagaaaacaagaaaagaaagcattggggcaaatttagcccagaggatatcaggaggggtgtgtgtacatgtgtgtgatgtgcgtgtccacatatgtgtgtggtgtttggtgtggtgtgtgcatacgtgtgtgtggtgcatgatgtgtgtttgtatgtgtgtgtagtgtgtgtggtgtgtgtgtggcatgtggggtgtgtactctgtgtatatgtggtgtgtgtgtgtgccgtgtatggtgtgtgagctctgtatgtgtgtggggtgtgtgtgtggagtgtgtgctgtgtgtggtgtgtgagctctgtgtgtgtgtgtgtgtgtgtggagtacgtgctatgtggtgtgtgtgctctgtatgtgtgtgtgtgtgatatatgcagggggtgtgtgtgatgtgtgtgctctgtatctgtgtgttgtgtatgtgtgtgtaaaacctcatttgttgggccactcagtcacactaaaatcccccttgatttcctattttaagtttctggaatatgacttgattgcagcgctgactcaggttagctgggtggcctagggaaaggcgtttctatctctctctgtttttgtttttgtttttgtttttgtttgcctcagtttcctcccatggatatgcagtgatttctctagtcctctcccacaatacaatgccaggatattaaaattccaaattgaatattccacttcttaagccaactgctgtcaaagttattttttcactttcttagatttaatcttgcaggatgttacatgcccatgtcaaaggtccccaagcccaccctcaggtttggtgatctgccaggaagactcagcatgtagctgcatccatggctgtgacttaatacaggagaaggctatggagcaaaagcagcaaaggcaaaaggcacatgaggtgacattcagaggaaagcaggccccagctctcaggggtcttctccctgtggaatcactaggaagcacttaatttctccagcaatgagtcatgataagaggtgcaatgttgtctaccaggggagcaggagagctcctggagactcagtggccaaggtttcctttgggggcaggtcacgtaggcaccctggtatgtttggtatgtgccaaagttccagactccccaaggaaggcaggtgctcatcatgaactgtattgcttatgcagttcaggcagtgagccactctaagggtggtgggaacgctgccaatatcctagttcccagataccagccaagggacagtcctgcaagcagcccttcataagactgacagtctcagacctactgtgttaactcttctctgtgccatgcaactttttaaatgatgttggctcatcttcattttcatacattcaacgatcactttgcatatgctcatcatgaaatgctggagaaagcaaatgaagaaaatctatgctttatgtactttattgccttgtacccaagtatttcaagccttaagaaaggtctcatcccaaattattttaaggtctgaaaacacattgactcatactcttcccttgctccacctaagtgtaaatggagttcattttatattctgccattaaggatcttctgctttctctctctccccgtgatgtttggttctttctagacatgggaaacagatggccagctaagtcaatcagatgtaatttggacacaagcatattctctggtctgttgttcatctaagagttttcatttcaggaaaattcaagagaataacaggatcatttaggaaagaatattgtgtagtgataaccataatgctgttagattattattattatcgacaagctaaaatagatgtcacaaatcaagatttgcttagacaatgtgccacagtataagaaaacaggatttgagattgagaaatataatttttgactcagaataacttgctagctactcaagaagtcagtgtgaactcaaggtattgtcgagcagagataaaggtgggttggaccaggcttatggtgctgtgtcctttgctctgggctggagcaggtggaggaaggtctccttaagcagatgggttgcttggcctccagaaatccctcaggcggagctaccatggctgtcagccctttgtggctgtccttctgagcagatggggcaggatggagtaaaccatccagcagcccagacttcctctctcctcagcaaccgcgtcacctgtggaatcctcagtctaggagccaccccgcttcccttctccaccgtcagcctgtggagcgttcctgcagactgggcacattgagcatttatgccagtccggtttcttttttcttttttctttttttttgatggagtctcactctgtcacccaggctggagtgcagtgacgcgatctcggctcattgcaacctcttctccaccgagttcaagtgattctcctgcctcagcctccggagtagctgggactacaggcacctgccaccacacctggctatttttttttttttagtagagacagggttacaccatgttagccaggatggtctcgatctcctgacctcgtgatctgcccgcctcggcctcccaaagtgctgggattataggtgtgagccaccgtgcgtggcccggtcttaaccagctcttcactgattgtctggatgctcaggtgtttttgcgcccgcgtctgtatagctgaagaggtctttcccaagctttttctcagcatcctggagcaccccattctcaactctgctgcacctactctccagtgttcaaaggatcgtaacttttcactctgcaggggctgagaacagctttcttcagatgaccctttctacctccttcatggctcagccccacgttctctcccacaggaagagctgtcctctttccttccagcttagcctcccaccgtgctgccctcctggtccccttacctgctccggcgttctaggacctcttttcatcagctgtgccctctgttgcttcagacagcttctctttagtaattaccgtatttcttgtgacacaggtgctcaggtcccccagttttaaagaaacctttccctttgctaaattccatacttctttctttctctgtctttactttcttccttccttctttcttttttctttctctctctctgtcacacactcctttcattctttctctttcttctggcaaactgtttgagataatagtttatagtagtgagtattttgggctttgcctgttacaatctactgaaattcactacttcaagatcacccatgacttccaaatgttaaatcccaaggctgtctcctggtccagtttctctctgacctccctgttagatgtacacagttgacctacttcctctgttggttcctgtatttggcagctctggacgccaaaacaaaatatcacacactgggtggcttaaacaacagcaatttatttccttatagtcctggagcctagaagattgagatcaggctgccagcatggtcaggttctgatgggggcctcatcctggcgtgcagatggacgccttcctgctgtccttacatgactgactttctcatgtttcttcttgcaaggacactaattctatccgattaggggccacccttatgacccgatttaaccttaattactttcatactccaaattacttctcttagtaattactgtatttcttgtgacacaggtgctcaggtctcccttcccttcccttcccttcccttcccttcccttcccttcccttcccttcccttcccttcccttcccttccctcccctcccctcccctctccttccctcccctcccccccccctccgctcccttcccctcccctcccctcccctcccttcccctccgctcccttcccctccgctcccttcccctcccctcccctccccctccgctcccttcccttcccttcctctttctttctctctctttctctttctctttctttctttctctctttctctctctctttctctcttctacctttattttcttccttccttttctttctttctttcttttttctttttctttctctctctttctctctttctttggggttagggcttcatcatctacaactttaggggacacaaggcagttcatagcagttgctctcctttggtttgtatccaactacactgcctggttgatcttctctctgaatatttcggtgctatctctttccttcagtttgcatcttcccctctcagaaatgtatgtcaatctaaaagtccaatcccatccactttctgtattggtcatttcatcatcttccagggcttcatccatgacttgcacctgtgtgaccccaacttcggacctgccttctctcctggtcctgcttattcactcccccgcatccctctggccacctccaacaaaggaaaccttccccatgaccacaaaggaatttccctttgatttattcatttatttttcaatatcatgactgtattagtttcctaggactacaaaaaaaaaataccatgaactgactggtttcaaacaatagaaatttatttcctcacagttctgaagtctgcaaatccaaagtcacagcgtcagcagggctgtgctgactcagagggctgcggggagggtctctgtcagtactctggggagggtccctgtcaggcctcccagcacctggtgttgcctgcggtccttggctccttggcatccttgacttgcagaagtctcactccatccagtccctccctctagcgacatgtgacttttgccctgtgtgtgtctttgcatttcttctcctcttctaataaagccaacagtcatattggatgaagggcccaccttatttcagtatgacctcatggtaacttaaatgattacatctaccacaaccctgtttccaaataaggtcacattctgaggctccagaaaggacatttttgggggaagctatttaacccactatgattacaaattcttccaattctttatttgccctctctcacacattttatatctttccatctcctgctggacacacagtagacaactgataaatatatactcaatgagattcttaaaaaaaaaaaaaaagcatttttaagggaaggaaacaaaaagcagacagccccatcagggtagccaggagtgctggtgtgccaggtcctgtgggtccctgcagccctgtccccggcggcgccagcatccagctggcagccacaccaccagctgccgctgtcccagctgcaagtagcctggtctgtgtcagaacgggctgggggccagtaggggacaggatccaggcagtcctggaccaagcacaggggcggcaggcaagctgcttcacctgcatttcagatcctcactttcgggtgccacggtttattgggcatcttcaagtcctgtgtttccttcctcaaaaggaaaagggggaaatttgttaatggacaaacgactcatcagtttcccaagtgattagtagtctgaaaacatgtgcatgaaaaaattgcctcaaaagttacccttgattacaaaatcaattccaaacaaactgaatttttattggataaactgtcacctgtggttgaaacttcaacaactagattctatttgcaaagttgtattgactgtccaaggctcatgtatgggggaagtaatgagagtatttacagaatatttcagtgtgtgtagttcctgaaaatacagttattccaaaattaattccaaactaactgaatttttattggctaaatcgtcacctgtggttgaaacttcaacaactaaattctatttgcaaagttgcattgactctccaaggctcatgtatgggagaagtaatgagagtatttacagaatatttgagtgtgtgtagttcctgaaaatacaatgatgctgctgaaaatattggctgtccagaattggactttatgagcaacagaaaatccacagcacacactgctctgcagtagagcagagtcaaaatgttctttgaaaagaagctataaacagatacagtaaataagcaaaaatacacagatcctgtgtgctcttagaggtggtttcaggtttctgcatgtctttcattttgccagcagcgcacagcagggcttgggtttgcactcagaggagcctggctttgggtccctactgcacagttgtgagaccttccatagttaaatacctctctgtggacctgggtactgtgtttttataaagatgaagagtgccataactgcagtttcaggccaagtgaggtgctccatgaattggaacatagctaagtaattctggacctctaggtgtgcatttctctatagagcctgtagatagtgtggagcctgaagccagtgtctaggtccataccccatattcaacctggaccaagttacgtaaccttgagttagtcatataaccttgctatgcctcaatttcctcaactgtaaaatggaaataggaataaaaataacattatagtaagattgttataagaattaaatgaattaatataggtaaagttcttagcacagtgcttgacattaatgtttgtcattgtccttcttcttcttattattattatcattatcttctgtctaaagtgtttgtatcccagaaaccagaaggtcaggacaccgtggtttcaaaacaaataggccgttgtttgtgtgaggcttgttaggaagtaaaagaaaagtagttctatttaagaattgctaaaatgcaaggtatgctgaagaagtcatggggaaataatccaaaatccttcaatttcaacataaaagcattagaatgctattgaactaatagtctgtaggattttaaaataaacaactctttacttatttattaaaacgtttatttttcttaaatagcaaaagtatgatataaaatgacaataaggcagaatgaaaggatcttatattttgccttaaccatcacagctaaatcagagtatgtatttgcagtaaacattagtatttacattaaaatacttgtagcacatgtcagttattgaatagctaacaattctatggcatgcacatgtcaggttatacctaaaaacttctcgacaaccccattaagtaattgcttttgtcggccccactttacagatgagaaggctgaggcagagagagcttcagtaagtgacccaaggtcctttcttgaaattctccctctctagaagatagagattttgccttttcttaaactttctttcagtttcccatattatgtacgtgcataagagccaacaaatattgtcgactgaatgataacattaccattccagacacatagtagaagcttaatacatgtttatggagtgaatcttgaataagaaacttttccatgagagtggtggtgttatttccttttaaattcttcttaatgctttaataagagcttttgcttttctatatttttttctactactctaaaatcaaatttcacatcagcctctcctcccaaggcaaagagtgcctgtgttggccaatcaggggcagcctgggatttcatagctgacatctcctacgtgatgccgttctgagggaaatcgacatttcaaattcccagtatttattattcccaaaacaaaagctgtcttcttttattttcatgaaatgattttattgttggaaccacctacagctttacactgcagcatttgttaaaaagcaggacagtgcaagtcaaggcgaggctgacatgccgagaccttcagaggcgcgttacagcatttcctgatgcactgaatccatagccacaccacgagcctcagactttactttcagttttttatctaaagggttatacacatttggtgagcacagagtgtcaacctgccatggatagcttttgtgtgtgagggcatgttgtttcaaatagtgatcaatatgcttcaccaatttatgatgatggatctaagaatggtagaatttctgtgtggagaagcttcagggtgtctttttgagctggatactggagccctggaaaggttacatgggggaaagggatggcaaaaatgacagctgctgagccaatcagatcacccacacgcgcccatatgaggatgtaaatatcacctagatcagcctcccatctctatcactggctccgatttctcatcggagaattattttatagatgaagaaagcacccagatgtgaaaagtcacctgagcagtgaatggcggtgcagggactccaacctgggattttgtggtggttgtgtctgcactagttctgtgttcagttgaaaatttctccattactgtcatttaagcacttattctggataaggcaatgcttttaaagttgccattttaaaaattatatgacctgttttaaaaagacacaaaagagatagaaacacgccagatataacctaattataatcagtaggcttattatactgaaggaattacaaagacttatttttctgaaagaagttcattgaaaactgtacttcccaaaatgattcattttgaaataaacttataactgagctttacttcaatatcaaatatttaaaatatactttaatgcaaataatatgttgtatatctgaaaatgtttacctgtaatttctgaaaaaaaagtattatatataaatattgtcttagattgtttgggctgcattaacaagttaccatgcattgggtggcttataaacgacagaaatttatttctcagagctctggaggctgggaattctaagatcaaggaggtgggtagatttggtgtctggtgagggttctcttcctggttcatagacagctgtcttctcattttctcacatggcagaagaggcgaatggtgtctctggggtctctttttagaagggccctaacctcattcatgagggctccaccctcacgacctaatcaccctccaaaggatccacctcccgatagcatcacattgaggtttaggtttcaacatatgaattttgggaggcagggaaatagatcttcagtcgatatacatatttttttaatagatggaaatatccttaggccaatgtttcttgactttttggggggatcatggacatgttgagtaagtaataaaagctatggggcagtggatcttcagaagaacacaccagtatcgaaagctgcaacagtccaggccttttttgcttcctttcaaccttgtgactatctgcattccctcaccccccggctcccacttgtccttacccagattaaccagggattcatactccattaaaatgcctgatatagatgttggatcgtgtcttcctttttttcaacctaaattgcattttgaaaccttcagccacactcttttctctgatctcttatttgtcctggtttcctctgcttctttttatgcacacatttttttttatcctcctatgcccattgcattgtaccagtatctttcactacaattgttcttgtaccaggaaaagtaaagggtttttataaaaagccttcatcaagtcattttcaaactgcagatgatactaggaaagaaaggccatactgagattcccccccggctaattagatggtgaaatttttagttctcagcattgttatctgtttgaattgaaaccctatcattgaaaaagccaaatgaacttgaaattgaggagggccatttcccaaaacggaacgcagccaggctgaatccctcggtggagagccagggagcacgaggcccggatgcacgtgactcgtttccacagttctgatttccaagcgaagtaatttgttctttaaaaaagttattctaggattcaagactttaaaaaaaatctgtattgccaaatgcttaccatgcatgatgaaatattgaagaaaggtgtatctcagccttgcaggtaatttttaaatgatccacaaggatttattcaaggtcagtaaattctgtgttcgaactttccatgtcagtctgtgtcccacactgtgtccccatcaagtcaattcctctgatgctgaatctactctattccttgcctctaagtaaaaaaatttttaaaaattaaaaaacaaaacaaaacaaaaaaacaagcaaacaaaagaacaatacggcaatcgaagtctcaagcatttcctcttttactgaattcgacacaattccatcgctaagtagagaaaacctgaacatcctattgctggccgtgcctcccagggttctccagtaaaccttttccatgaaagcctgaagtccatttcagatgcaaaacatgcagaacctctgggctccgcgaggcctgatgcatgactttgataggactctgcacatgcttagttgatggtcctgaacatgtgtattttcctgaatttcttgtgctttttttactggctttgacttgttgacataagatgaatgtttctctcttgttttatcaaaatatttaagtgtttttagttttgtattgagatttttaaaaacaaagcttttcttgctagtaaggatatggatgattactttcttttcaagaaaaatggtgaaactggaaaagtaatttcatgtatttaaaatatacacttgttgcatagttattgatcagtttataaattttacacctttttggtggtgggaaaaatatattcatagtgacttctatcttaaattctggatctaagacgatgctgctttttactaatagtggctatagagtatatgtgttcttgtaaaatggttatgcagaaggagaataggaaggactatagatatgtgattaaagatatttctcttttgaagggttagttaaattgaggaggcggcacgagggacaaacattgtaaactctgtgtaacagcaaggatattcaaggtgacaaggatcagaacctctgtgaaggttcagtaaaattatttgtgcacatcaggttattatataggatgtaaaaatccagttttatggcaagatttatttgtttatttgtgactaacatatacgacctgaatttaaaaactagaggcaacactcatagcaatttagaatgcagcttttcttgtgatttaaattggacttatttttctttagtctccaaccctttcttagaagaattatggtggaacagaagctgtaaattagggacagttatttgaacctagttacagaaacgaagttattggcgtggggattctataggagggactctacattggatggaaatgaaggaataactggaagaagaaaggagcaaataggcccaagtatacatttcactgtgtgaacccataattctctctgatagctgcatgattaattcaaagatttattgatttttcccttctctactccagcctgctgacctggttttgttgacaggtttgtgtggatcaagccaatctgacagatgaaagtgtgctaccatattagtccccgtggtctggggcaaatattttatacagtgtccttatcaacagtaaccgaacacatgtgaggcatccgtcaacactccttcccatgccatgccatgaaatagactcagagatgccagccccacagcagaagcagctgggattattcgttttaatgaacatgcatcgtgtgtacgtgtgtgcgcgtgcatgtgtgtgtgtgtgtgtttatataatgaggtgggagtgtggaagttatggcatttttactcttagtaacaaatattaactgacagttagcttttaaaaatacctttatgggccgggcgcggtggctcacacctgtaatcccagcactttgggaagccaaggcgggtggatcaggaggtcaagaccatcctggctaacacggtgaaaccccgtctctactaaaatacaaaagattagccgggcgtggtggcaggcgcctgtagtcccaactacccgggaggctgaggcaggagaatgccatgaacctgggaggcggagcttgcagtgagccgagatcgcgccactgcactccagcctgggagacaaagcgagactccgtctcaaaaaaaaaaaaaaaaaagaaaaagaaaaagaaaaagaaaatacctttaatgatacctgagatttacttcaaaacaatccattgccaggggtgaggttgtagcctgaattgataatttctgaagctgggggatggtacatggaggtttattatactcgttatatccttcatgtgtgtttaaaatattctataatgaaaagttgaggaaaaacacctataagacaaatcatattttttacttgaaacttcagattacatgtttaaacatgagcaattggcacatgaccaagccaggaataggcagattataaatgtcatattttaaaaattaatgctacaacaactgaagcatttttctgttggttatgagctctaaattctggccaaagactagaaccacaaataaaatggtcctttaagactagtgaatcatctccaagttgagtgtattccttctcagctaataaaatgagatatttttgaccaacatttctcaaactgtgtccatggagagattaggaagatagggaaaagattatgtggattctggttcaaaaaattttaggaaataatacattaagcaatagcaacccagttccatgcagcacgaatgtcaaagtgattgtggccactttttaaaaccaattaaattagtttatttttatttttattttctctttttagatgtattagtccattctcacattgctgtaaagaaatacctgaggctgggtaatttataaggaaaagagatttaaccggctcacggttctgcaggctatagaggaagcatggtgccagcagctgcttctggggaggcctcagggagcttttactcatggtggaagtcagagctggagcagaaagttcacatggtaaaaacagaagcaagagagagtgagggaggagctgcatacttttaaacaaccaggtcccatgagaacttaccatctgaaaaatattgtggatagtgctaaactattcatgggaaatccacccccatgatctaatcacctccccaggccccacttccaacattagggattacagttctacatgacagctgggcagtgacacagatccaagccataccaccagaccactcatgttattctatagaatataatttagaaaaaactacttccaacgtaaggccactagaggtgatttgcataaaattgaggttgtttaaggccttgagttcaacaattcagggttaaatatgagttagatgttttcataggaccaaacaacatttataggtcttgaataaatctgaaatttctacttttataaagtctaatatgtagatacactgggtttcattggattctaattccattttttgtattttggggggggcatcatttttatctttactaccgtaaaacaagacaccatcacagccaactccaaatggccagctgtgaagtggaaggaaagatggaacaagaggcaaccaaccatgtgtgggtgctcaggtggaggggactgtggttggtggaagacccctaagtggagtgagcttggatagggagtcaggatgggaggtggccagggaagggatggggcagggccagcctgcatatgaagggccttcctggttaaggcaatagctttggatttttatgcagggataatggcaaactgttgaattctgggctggggattgatgtgactgctgttgctgtgtggagaaaagtgcgggggagagcaaacataccattagatgactagtaggaggctggtggagactgacttgagtggcagacatggggacagagaaaaaaaggacagatgtgagagatgtttggggaagctttggtatgttggctgatagattagatgtgggggtgagagaaagacagtcatcaaggatgattcaggtaaggaatttagtgcatgttggtaccatcaataggtgtggaaactctattatttaaggttatcaatcagaaattgaatagcattaataataggcaaagccctttaggcactctgttcttggtgtatatgtgtgtgcggaggatgtcctgtgagccacttaggctcactataaatatctttctgaagccttccttgaatatactactctggcctcctacctttgctcaagctgttttcttttttctgtttcaccttcagctttatcttactcatgctaggtcagacttatcactgacttcactgcatttttgttggctgatttccagttagtcaaaataaaagaaagtggatagttttggcctttgaagcaaaaagagacacagggacctctctttccagcttccaactccggatatagcagttgatggtcgacatctcacagtaattattaggcactataattttgctaaatttacttaagctaaactaaagaccaccaagagcaccttctacggactgatgttatgtccctctctaaaagccatatatgttgaagccctaacccccaatgtgactgtatttggaagtgaggcacttaaggaagtaattaagattaaatgagggcatcagggcagtacctaacccaataggactggtgtccttataagaagtgggagagacaccagagagcttgctctttctctctctgccatgtgaggacacagaaggtggctgtctgcaagtttggaagagagccttcaccagatacacagtggctggaaacttgatttcggactctggcctccagaactgtgaaaatataactttctgttgtctaagccatcctgcctgtggtattttttgcagcagcctaagatgactaatacagcacccttctgctcttctgtctgactgtggtttcttggagaactgctgtcttatattcttcttacttccaatggtcattcaatttccatacggtttccatgtagtctaatgtcagttcatttttataaatttaaactatttttccatttttcccatagtcatcctttttttttttttttttttgtttaaggaatcatcttgctctgtttcctaggctggagtgcagtagtgcaatctcggctcactgcaacctccacctcccagtttcatgcaattctcttgcctcagcctcccaagtagctgggactacaggcacacaccacccaccacacctggctaatttttgtatttttaatagagacggtgcggggggggagtttcactatgttgaccaggctggtctcgaactcctggcctcgtgatccacccacctcagcctcccaaactgctgggattacaggcatgagccactgtgccaggcctctttgttcatgttagtgtatggagacttttttatttgttcaggctagtctgttcgccttttcttcctttgaagaaattatctgttctccttataagttttacagtgttcaaactttggatcatgtctttttctctctttgatctctttctaaatatccctttatttaaaactgtgcatggattttctcctaaaatcatgtggtgaggaaaatgaacttttacatttcttcaggaaagtaaacctggtcaaagactacagttgggagaaattttagacactcacgtatgtgactagactgtggatgtgaatggtgtctcgttaagcttgtctcaggctttcatatggcaaagtagtatttttaagttctttttaggtcctgcctttacctcaggatgcattttcttataatctgattacaatattttttaatggagactattttctcttgtacaagttatatgacaaaagtacatttggcttgtcttctgtttgtttgagttgattgtgttctgattaggaatgctaagtcacctatgcaaaagcaactgagaactaacttaaaaacatgaattattggggaaatgtttgtacacccatgttcatagcagcattttttgcaatcgccaaaagataggaacagcccaaatatccatcacccaatgaatgagtaatgcaaatgtggtacataacattccctggaggatttgtcagtcttgaaaagaaagagaactctgacatatgccacaacaatcttgagggtattacgctaagtgaaataagcgtgtcacaaaaagacaaatactatatgattccacttatatgaggtatctaaagtagtcacttttttttttttttgagacggagtctcgctctgtcaccaggctggagtgcaatggcgcgatctcggctcactgcaacctccgcctcccgggttcaagcgattcccctgcctcagcctcctgggtagctgggactacaggcacacgccaccacacccagctaattttttttttgttttagtagagatgaggcttcaccatgttggccaggatggtcttgataagcagtcaaatttacagaggcagaaagttagaacggtggttaccaggggctggaaggaaagagaaattgagaaattgtttaataagtaccgagttaacaatactgaactgtcctctaaaaatgggtaagatagtaagttttatgttacatgtactttaccacaaataacttaaaaaacgtattgcacctcttctcttaaaatagctgcatgggaaaattgattttatttgtaagtaaagacctaggtgaattaacttgaactagtactatattgtgacattgtattttataaacaacttccaaaatcataatcataattattttgtcctggtatttttttaaaggatgtgtgtgatggtattgaatttggacttttttttttattatagccatatgttgaaaaaaatcaagccttagaaaatgaaaagtatattgtaggcttaaaaattataataacatggtcgggcgcagtagctcatgcctgtaatctcagcactttgggaggcctaggcgggcagattacctgagttcgagatgagccctgccaacatgatgaaaccccatctctactaaaaatacagaaattaaccaggcgtggtggcacacgcctgtaatcccagctacttgggaggctgaggcaggagaattgcttgagcccgggagatggaggttgcagtgagccaagatcaagctgctgtactctgacagagcgagactctgtctcaaaaaaaaaaaaaaatatatataacaacatttgggaaaatagaatgatagtaattttatctgtctttatattctttaacactttggtgactgaattatagacaactagtgtataagctacaggaaagcagagattttggtctgttctgttaatttctagaatagtaactggcacataggaactccatgactcttcatttaatgagtacacgttgagagtatccaagtactaattactctttgggcacgtggattgtggaagtgtggagaccagtccacagttctcctagatataaggagctttccctgtgtctgttgatcacataattattcatcagtgagctctttgttgcttttgtatcttagggtaaataatttaaacagatcatatagataagacactgaaaatctctccactgagaggtggagagattcgtctagggtctcaaaataaatgactaacagaattgttctctgttcaggacactaagtgatgcaagaaatatttagtgaccaccgactctgtgaaggtcttgagcttggctttgtgaatatagctatgaataagagaaatacgcaatccctgcactcaaggaatttattatctggtgtgtgtgtgtgtttggcacggaggtgatataactgcttcctgaactcaatacaatcttttcattacagagcctcattttagccccaatttctgtatcttttctttgtttttttcccaatcactatcttttgactggactatactactgaaaggaagtggagtccttaggcatctctgggtggtctggagtgatctcatcttccaggaaagctgttacacagacgttagtttctgaaaatgatatgacatgcagctcactgtaatacaatctattaattcaacagataaagttttatgttctaatctcccagaatagtacttaaacagtttagtgcacatgaatcacccaggaatcctgttaaataaagcagattctgattgagtagcttggtgtggggcctaggattctgcatttctaatgagctcccaggtgttgctgaatctgctggtccaaggctggtattgtcagtgacaaggctgcaggttcttagccctggttgttcattacaaccccctgggtggatttttacaaataccaatgcccttagagatttgctttaattggtctgggcttgggctccagcattcatattttgaaaaactttccaagtgagttttatgttctaccagcactgaagaccacttccctgcacaaacacaactgatgctgcctgtcattgtgtgtaactgaatccactgatgtgagttggtgcatatcagtaccttttataaatgcaaggaaggctggaggctggggaaattgtcataagacagcacccagtgcagggactagtgtacagcagtgtgtttgctgaataagtgagtgaggcaacgagtcattttcagacactgtagaggatggctagtgactggatcccagtgctgttgcctggagctctagcaactgtatttggtatctctaaacatgctggctatgggatagcagagttaatagaatgagactggggccttctacttccagataaaaatttggaaaggtattagaaggaaggtactggggaaataagttttgatctatgatagataagataattgaaaaccaaaccaaagaaattaaattcagagtggagaggtgtattagtccattctcacactgttatgaagaaatgcctgagactgggtaatttataaagaaaagaggtttaattgactcacagtttcacatggctggggaggcctcaggaaacatagaatcatggcagaaaacaaagcaaacacatccttcttcacatggcgacaggagagacaagtgccaagcaaaagcggggaaaagccccttataaaaccatcagttatcatgaggactcactcactatcacgagaatagcatgggggtaactgcccccatgattcaattacctcccacctggctcctcccacaacatgtggggattatgggaactacaagatgagatgttggtgaggacacagccaagccatatcaagaggcataaatcgaaggtagccttccagggactgaggtcagatttgtcccaagttagacactttgggcacatattttcaacagacattccacaaaatatgcaagtatttattttttgatagtatgtttaaatacaaatagaaatcaagccttaaaaatgactcgctgatgaaactacatttctcctgctcgggactgcatttcagatactgtccatttgcatctgggtccatgatgtgctgttgaaataacatgaactcagcttgtaggtgaaggtggggagggaaacatgcatttttccatctgaacagaaagtgtgttctggcttttttctgagatattatttttattgaattttaagacccacacaggaagtggctttcacttggtttcatcttcctgatcagtgcatgttggggacaaaggagagaggagggagttaacctggataagtctgctgcttcttcgggagagtggggcatcccaccaacctgctgcccatgttgctttgtggggatacatgaagcagcttctagaaaggcttctctaggagcttggtgaggctgtgcaatgccttttttgcaaaacgcttgctgttcactaatggagcagatgaaataataaagccaaccaaggaagcaacttaatggggaactaaccagccacagtggcttttggaactcttgtgccttgctgcacatcactttgaagtagtctgtggagtccatgcttctgatccttggaacatttggttcatttttatgtcattgttgtctagcgctaaccgcaactggtcccatagacctgaagtagcccaggtgcaggggcaaagcagtggccaggtgtgagtgctgagggcctaaatatttcaagtacaaaacgcccaggaaaacaaccaccgggggctttaccatacttataaaaaggaatccttccctctgaaagcctccagcctgactgtaggcagaagcagaagcagccattgcccatgcaaggtgaggaagaacaggtgttggtgaacagagtgggctcaggtcatcatttgtgtggcaaaattctatcagggatgaaagtatcagcaatgggaccacctggaacccaagctctgccactttcttgctatgtgatcctgggtaagttatttagcccttctgttccgcggttttctcctctggaaaatgatgaggatgatactactctgctcatagggttgttttaagggttaaatgaggtactgcatagaaaacactcatctcagggctgggcatgcacagtgcatgggtgtagctatcatcatcctcctcatatttagaatgcttttctgtggccacccatcatcagtatgtgcctatcttcatcagcagtgaagaggacagaagcttctttctcccttcctggcatgctggagatgtggttggtctcctcaggttaccattaaattgttggcagtccccactgagagtagggatgcagccaactccacaggcacctgaggagctggccctctagcaggtgtcagccaggagagacatttaccaaactgaagttggggaaaagcctgagctgattccacactctaagtcaccttagggcccaaagaacaggtggcatgagatactcagggaatgctatggcagcgtgcctaaccatggttctgcaatcttcacacccgaggtcatggcagcggacaatttctgtcttctggataagatgggggtgtatctgtctgtgagcattcattcactgattcattcaaagtggatggattgggcattgccatggaccagacccggcacagatggggtgcccagggtggaacggtgagcagtagtgccagctgtgtctgtgctcatgggcctatggtcttggggaagacctcaagtaatcatgtaaataatgacctgcttacaattgtgagacctgctggaaatgaacaacaggagtgggggctgtacggggaatttcaggggacctggcctgtcagaggtcagggaatttatgccctggaaagtgacaagttgtcctttagattggttaaagaaaaatgaaagtgcggagaggacattccaggcaaggggaacaggtgcagtgggcactcacagaaggccaaggggacagccctgttccacaacagcctgctcagagtccagtttgctccttgctcctgattggagatttttcacatactgtctcccagcagaggattctgtccacaggtattgacagggcctggctggtctcttcttgtcattcaagttgtagttcaggaaggatgcacccagaaggctgcttttgactactcactctgaatttgccacctccccatgcccagcctgcctctgtgttttctttgaaattctgccgttcctttattcctttgcttgctatttataaagaaaagaggtttaattggctcccagttctgcatgctgtaaaagcctggcaccaacatgtgctcagcttctggtgagggtctcaggaagcttgcaatcatggcagaaggtgaagcaggagcacgcacaccacacggggaaagcaggaacaagagggagagaagaggaggttccagactcttaaacaaccagatctcctgtgaacgaactgagtgagaactcacttatcaccaaggggatgggaggtccacctccaggacctggtcacctcccaccagaccccacctccaacactgggaatcacatttccacatgagatttggaggggacaaacatccaagccctatcacctgtgtaccatttgttgcttctcctctgaacaaaagtcctcaaaataggttcttcgtcacatccactgttgtcccttattttcaggacactgtctgacaatctgacaaggaagtagtgggcactccacgtctgtggagcaatggacagtggctcccagtctggccaaatttccctaacatgaaagcatggaacacttcctctcacaggtcaaacgcgtggaatgaatttgcaatgcaattctcggcacagctgactttccttgttgcttctgctggttttgatcactttccctggggtgctgtgccatcaggagcaggggcctcctctttcctctcctgtcggtcctctccaagtgatctgcaacttcatcccggggggaaacagggcagggaacttcctcctcaatttctgatattgcaaggtagcaaactcacacaggccttgataacaataaatgaagagtcaggtctttacaaatatgatgagaaaatacaatggaagtcccagtggggagtccccacttactccttccatgccaatacagatctccctacagactttaccactggttctatatatatgcgatgccagtgggaaggtatttctcagccgttagaataatccatttcctttatcccggactatggataagaggacatttgcaggagaggggagacacttaggaagaaaagactggctttgtgaatagaaatacattatttgtgcatatgttgtagctcgactagactttgagcagactgatatctgaaaacatatttataagcctgttataaactcataattctaaaatattgaattttatttattttgcatctataaactgagttttgaatttgtgcagtaatttgcattattcagaactcttgattgcaagtgacaaacagaaatcaaaaaaaagtcttattggctcacagaactgaaaactccaggagtaactgccttcaggcccagaagcatcaaggtgtccagaaactctgacaggagcacctctcactcttgctgtcagtcttactgctcttggagtactctggtttagattggctccttggcatacctagcatggcacgttgcacacaaccccagtgacagtagctcagtagccagggggaaagagtcttctttctccaaaatccctgagaagggtcatgtcacatgcctatctgtgaacgagtcaccatgtctaggggcacagaggtgatgaccttggtctcatgcccatgagggatggctcctcaaaggaaaacccaagtgctcttattctaagagggagaattggatgcccagagacaaagtctatagatgtacgtggtccagtgttgaagcggtgggaggagagtgccggcaacacaggcaattccacgttgtgtgcgactggcctgtgcatatggaggtgttcagtgacctggccctggacactcctgctaacaggacacacacatactctcttacacacatacatgtccacacacaccacacacacacacatatacaccccccccacacacacactttgacatacactcacatgcttatattccccccacaccatgcacagacatacactcacatgcacatatgtcatacacacaccacacacactgacatacatacacttaacatgcatacatgcacacaccacatgacatacactcacacatacacaccacacacatacatactacacatactggcatacacacaggtgcgcacacacacacactcacatgtgcacacacacacacatcattgacaactatgaaaagcccctgcatacctcagagcccctcaagctgggcttctgatgacacctcaggcactctcccctttttattttgtttcccatttacttcctaccttaccctgttcaggctgccgtaataaagtttgatggactgcgtcgctgaaactacaacagttcatttctcatggctctggaggctggaagtctgagatcaagatgcccgcagggtgctggtgagggccctcttcctggtggcagaagccgacttctccttctttctttgcctggcagggagcagggaaggaagtgagtggtcttgtggctctctgagggcactgattccattctgccccacctcccatagcatcatgttggggaacagggttccagcatattaatttaggggacacaaacatccagcccctaacacttccattctcattaattgccttcaaagagagctaagctaatcctaatggtaactttggcataaagcaaaactttgagaagatgacatctgatatctgctgttcaatgcatgcttgttgggagaagagtgttaagatttggactttgcgtcacttatggccaaaataggacgctcctgtatgtctgcacttgaatttaaatatgccagtctcaatataaagcacggaactcatgctgtttaagcaagagcacatattaaggctggcatgtctgtcaagataataattttgatagaggattaaaaaaaggaaaaaaatgtagagaactgaaggtaaaagatagccaggattagacctttcaatattaacagtgaactttctttagatatttcttacataatcatcaatgcttataaattctagtgcttctgtcttttcacagtgttgtgtttttgtttgtttgtttgtttgttttaacaacgtaatgtgcttattcctcaggcttcaggtaacctctgtaattacacacccagtgctgatgcccacgggctgccacaaggctgggcatgttactttatgctctaaccctatgtgttcaataagtactttgaaaaaaataatatcttgctaggcatattttaaatcataaaaatctcaattttagggttttcttccctcaaatgttaatttactatattatttacacttatttgccaaacagggaacttttgctcaaagaaacaggtgcagttttagaagctgaaattaaacacctctctattctcatattgccttttttccctttggacacgccccaaagcagacatcctgcttacaaaagagagcttaatggcctccctcctgctctccctgcctgaagtctttctagaatttggaaatatgtccattttgttagggcaatctgttagtgttaatgattttatcaatctaaactccactaaaagaagcaaatcaacacaatgctaataaattctgtttgttttctaatcccaagaagacacaataaattaacatacatttttaattttaattataaaacctttcaaatagggatgttgtctctcttatcctcactgtcattcttgtgcctggtacagagcagatattttgtgagggttatttttgttgtcgaataattgtattttaaatacacagaaaaggacagagagtcacaaaaacaaaaagcacgaaagaaaacaaaaaccaggtacttaagcccaacatagagtcagatgtttatgctttgccacatttcattcattcctttttttatgaatacgagtgttagatagaattgaggtcccactcacattttctatacacatcttgaaacctctgcaacgtatttgtgaatctgtaaaccatagaaactaacacagtgtatttttcaaatgcatataaatgatatcgtgcatgctaagatttttcttagatttcctataaatcatttcaatcaaactctccctacttttctgtggaaactatgtaacaaaatgctctatttccggaagcctccaggccaagggtgagtgagcctggggtgttcaaatgtaatcagagtccaaaacaggcccttgcttgggctcaaactaaactgagttaagaaattagcctggaagggagagaaggtgatgtcagatcttaataggataacattgccatgagttctccttgcaatagaggaggctgcttttcttcagcagttattgagatgtatgtttcttttttcactaaatttctgttattgtcggttgattttgaccacaggttgttgtcttattgtcttgactgtcaaggacatataatggcagagggattcttaggtcagcagacatgctctcagcttaggcaagcctcaggggctgtatgtgtttcagaatttctcacattttagatagctatctaaaagtaaatgttaccatactctgcatgttttctacaccctcacggtggaatgtggggcagtaatgcttcaagatttcttcagcagaactgtggaatttttattctgtgtgtaatgaacaaggctcaaatagaacctcacgtccatttgggccatgttttggcagcaggtgaatcatgaaaatactttttcatttttgaggtatttttggattgtgggattgcagataagggattgtagatgggtgttattgttgttgttacaatataaatttctataacttctggccagttgttagaattatcccttgtttttcaatgttgactcctatccctccctacctctctccctcctcctttgatttcttctttcctgctttccttccttcctttctttctcttgtcatttctttaggatttgaagagagggcacagtatacgatctttaaggactcagattttcaagttaagcatatctgtggccaaattatctttctgctgctcattaactgtgtggccatttttctatgtaacttcaggagtttcagtttcctgagataatcatatctacctcctgtggttttgggaagatgcagtaaggtgatggatgtcaaaacatttaacacagtctttagcatataactagcacttgatagatgaccactgctagtattgctgttgtcgttaccatatcacacagcatgcaccatttgctattctcttttaagcaatgaatttattcacattcaatttcttgaacatttttgaaatgcatctggtcttcgcttacatgtatgttatttggcaacctgtctgaaaatattattaattatggtttctatcgttggctttagctttaaatgttgcttgaaggcccctggcacacagccatgcttgaccatgtgaggaacatgatgctgcccccatcaggtacagcctaatggggtggatggatggatcgatcgatagatacatagatagataatagatagacagataggcagatagacgatagataggcatatacatagatagatagataattggtagatatgcagaagaaaattagatggtagaaaggcagatagatgaaagatagatacatagataaatagataggcatatacatagatggacagataactgatagaacacagatgatagatagatagataatagataaatagtagatagatggatagtagatagataataaacagaaaacagaatagatatgagagagatgatagataactagagtgatagagagatgagagagatgatagatagatagatagatagatagatagatagatagatactcatctgatcaccaaacaggtgtgaacagaggatgttttaaagtgtgggattctgcatttgctgtgaacaggagtacaccagacaatccttctataggaggaagggaagaatgcatggggccaaggttttattttgctaagaaatcatagccttcccagagtttaattgcctccatttttatcaaatagttagaaacacgactattttttttgacccttggaggcacattggtgacatctgtgggggcagcgttactgatggttgtccgtctgtatgttgctgagccctgcaatcctggtatcccaagatgcctcccctcttccaaagaagcacttaagagctcaagttgattaccgcaggggcttgaagacgaagcctcatttgcccgattatcagaacagatgaggtgtgcacacagcctttgcaactttccattcatctcaggaactaaaatgagtaatatttttaagactaatgtcttaaatttatgattttatttgattctttattcagcaatttgaatattatggttgattacaagtacataataagagcctttctgtgattggcattttcatttttctaggtaaataaagtacctcttgatctgtttttatttttcttcctacccccactccccccatcaattttctttcacttgtgtttctctacacatactgtgggcatcccaaggggaccgtagtcttcttgttcatgtttcagacttgtaagtcgtatgcaaatgcagccatattttacagattggcaattttgctataattaagcttcatgaatatgaagattcttgtagaattcccaggacgccccatggtgaggatttgcaatgaaatttcttctcagctcactgtgacctattagagtgtcagtttggctcagtttcaacatggtgtttactcttatgaagtgcaaaccacttattagctaatttttaagccatgacagaagcagcctgagaggcacatttgtccagagggcttgacaaaaagctagaaggtcagtgtcttcacagacccactgaggttcagaaattaaatgataattttgtaaaccaggcaggaagtgacatttgtgcaattgcctttgatatgttttctttggctgtgtttggtttctttgtctctgcagaatctcagaatgagccagcctctaactaaaatggcgctgcttcatcttaaaatctctttgtgacagcttatgacaggagatcccttggaaccctggttctctgtgggacctttcctggactcctgtgtctgcaatacaaatgttaattctcagctctattaatacctcaatatcacttaaaagatatccaagggaaactttacctggccaatttctttccacaaagtagcatttctgaattggagattgctggttggctcattcttattttatttacttttgtaaacaggttatcatttataattcaaaactcaaaaagcatacagaaaaaattctagtctcactccagtcccttactctccattccctggtatgcctcccccaccctcaggtactaatagttattcatcggtatccaaccttccagaaattctcttgtatatacacaaaacaaatagaaatgtatcactttgtaccaccagtactttagaaatcatttcagcatgggtactcctgcggggtactccctgatcagattgccgcgttgtggaagatttctttctgcctgtcaattttatttccagaaaatagtggtcacattgctttagggtaagtcaccaaagggtgtagctgcgcctgtgtctgtgcagccctctggtatcctgttctcagctgaaaataaagccctggaattggtccatttcactttttctttttcttgcagtttgaaaggcacttgaactagcccactaatgttgctttttactccttttacattttaaaaggagtcgtaccctggtttatttgcttttattgcctgtgaaaatggcctgagtaattagaccaacagagaattgcatcttaagggctaattattgatatattccttgtgtcagctcaaaagtaacctctggggatagaagattaggcagagtatgcctgcccatgaatatacactgttcatgcctctctaggcttcaacacacacaaggtcatgtaaggcaaccttacctaccccattagggtccagaaagatatccacctaggagagagtgtaaatatcacacccatcaactcactcttatgcccagtggctcatcctttcaaacatgcaaaactttctataatggggaatctgaaatactttaacaagtttaaaaatctttattgagcacagattttgatttttaaaaaatatttttgatagacatactatggttcaagtcccatacttgcattaaagggttaaggtggaacaatgcttcatgcacagttagcatttcatattttttgtccagtgaagaaaagaaaacattctcaactttgatctcctttagtttaaaatgagataagataagatacactccagcatcatgctcttacttaaactgagctgattctcttgatttctatttcttgctttcctcgccattggcctgaaatgagtaggcatgacaatttttgtccatatgttgtatgtaattaaactccagcctttacattgccaccatcaaagacagcgaggaagagacattttattattgcaattcactgtcttaaggtggaagcttctgcaacggtgacacagaagcgtgatggagaaggcacaaaaatgatccatcttgctcttttaagagaggagaacataccggacttgtgcagacagaacttttttttttttttctattgaagcatcttctagtgcatttaagcttttttcttgtcaacttgaggatggagtgaagaaataacacacacagcttgtttgacagtgtggctattaatgaagcaagcaacaacagctttcactcatgcacaacagggcttggctgtgtggtttgcaaaaagcgatgaacattttcacattaggattttgaaggggctggtgaggaaactaaagatcatcagcatttgcgtgtgaaaataaaatggaaacgttaagaaaggttgaatgtagccttcaaaagggggtagaaagaacaaaatgaaataagagttgctctggtttgaatgtatgtgtccccccaaaattcatatggtggaacctaaaacccaatgtgataggactgagcagtggggccactaaggaaatgattacatcatgagcactctgcttccatggatgagatgagtgctttatttttgttttgttttgagacagtgtctcactctgtcacccaagctggagtgcagtggtgcaatcatggctcactgcaacctccacctcctgggctaagcaatcctccagcctcagcctcccaggtagctgtgactgcaggtgtgcaccaccacacctggctaatttttgtatttttcgtagagatgggatcttgctatgctgccacgctggcctggagctcctggactcaagcgatcccctcaccttggcctcccaaagtgctaggattataggcatgacctaccatgccaggtggattagtggtcttaaaaaagaggttgaatagtggctcatgcctgtaatcatagcactttggaaagtcaaagcaggaggatcacttgcatccaggagttcatgaccagtattggcaacatggcaaaatcctgtctctacaaaaattaaaaaaaaagaaaaaaattagccagacatggtggtgcacacctgtagtcctagccacttgggaggctgaggtggtaggatggcttgatcccaggaggtcaaggctgtaatgagccgtgattgtgccactgtgctccagcctgggtgacagagtgagaccctgtctcaaaaaaaaaaaaaagagagacagattgaagggagcacaatagcaccttttgcccttctcccatgtaaaggtgcagctatagggtgacattttagaagcagagaggaagccttgcctagacaccaaatctgtctgtgccttgatgttggacttcccagcctttagaactgagagaaataattttatgttatttctaaatgacctggtctcttgtgttttgttatagcagcacatgtggactaagacaagcatgatattttaggttccttaagcagggtagagaagagagtcagaatcctaatatgtctagttgctgtcaagatgggtgcatgagtgtggcacgctgtggactgtgcactgcaagaaagcaggctccattttctctctccttctctggctgcttcggaatctccctaagctagctagtgattacctagtacaaatacgcatttccagacgtatctccctgtctagactgagagtatctccacagctgagggggtatccttaacccctggtggaaaatctggtacttagtaagtgtggcaggcagagtaatggcccctaaagatgtgcgtgtcctaatttctggaaggtgaatatttcaccttacatggcaaaaaggattttgcagatgtgattaagaatctggagatgtgattaccatgaatcacctggatgggcccggtgttgttcaagggtcattataagtgaaagtcagagtcaggagagtcaagttcagcatgatgagatgtgaggaaaactccgccaggcactgctgactttgaggatggaggaagcagccatgaaccaagaaacagggatggcctctaagagctggaaaacacaaaacacactttctcctcgagccttcagaaggagcacagtcctgccaacaccttgattttagtccagtgagatccatttaggattttgatctctaaagcatgaggtaacaaatttgtgttattttgtgccaccaggtttgcagtgatttgttaccgcagctgtaaaaatttagtgcagtgaacaatcaaaatcgaacagcctcttgcttcacatgtgccatgtgctgacatcaaagaggtgctgagaaagtactgctattgattttgtactagcaccagaaagcagagagcatgcttctaggactcaacctagagctccatttctatgctcttgataaacaacttccatctgcatatttgggtccatttccctgatagccaatatgatttttaaaggaaaacaaaaatatttttaccagacagtaatatcgtattggtgattgggttaaaaagctaacagtttttcatgtatgtaatgggtgtgaggtttttctttttttcttttttctttttctttttgagatggaatctcaatctgtcacccaggctggagtgcaatagtgtggtctcggctcactgcaacctccgcctcctgggttcaagcaattctcctcccttagcctcccgagtagctgggattacaggtgcccgccacaatgcctggctagtttttatagttttagtagagatggggtttcaccatgttgcccaggctggtcttgaactcctgacctcatgatctgcctgccttggcctcccaaagtgctgggattacaggcgtgagccactgcgcctggccaggtatgagttttaatccacaaagacggcatggttagaattgaagttgtatttttgtatagttcaacttaatttgtaacatatactgcatgatgccaggtggtagaatcttaatttcatttaattcacgatgatcacagtcaacgcggggtcttctccactctgtgtctgggtgctttcctctgtgtttaggagtctaacctggggctaaaggatctcagcagaccaagtagagagggtgtggccttctttccatcactgataccaattcacggccggcatctgcagctaccaagtttccatcattgagtcagattgcctctggcctcttgtgtccttaactattaatataaagcctctccacaaaaggctctttcaacaacatctatggccttgtgagacaccctgaaaatgcctggctgtggaccaccctctccagaggtggaggaactctcttaggctgttgtaggaccatccacctgggcacatcaaagcagccatcttttttctactgctccaagaccgtgtcgttaacaggaacccatgtggaaatgttggactgtgttggagtttcctgagaccaccccttgggttgatgatttgctggagagactcacagaactctgaaaagctattgttgttaaggttatagtttatgaaacagtgaaaggatacagattaaaatcagcaaaggaaaaagtgcataggaaggagtccaggaaagaccaggcacaggcttccagttgtctttcccggagacctatagggacagggcttaactcttccagtaagaagttgtgacaacacatacagagtatcatcaaccagggagctcatacaagccttggtgtccagggttttcattaggggttagtcacatagagtgctcagatgacttaccttaacacttgagtctccaacccctcctccagaggttcaactgacacagcgtggcccagggtcccagaagaataaaaacagacactcgtcataatccaattgttggcataaacaatcttgcctggccccaagcctcaggtctgtaatgacacttttatcaggctggaaattgcaacagcttagaggttacctcctaggagtcagtcaagggcaagatctttctttagaatgtgtgggatttggaccccctaagcctgtgggattaaccctttactgcacacaggcctagattccctgggctctcagctaagcccaaagccatgtgtggtttccactgtgtctcctcccattggatgtgcctcctgtggataggtccttgactcagggcttctctgctgttagccatgggctcgttattcagtctgggtggaaaaaaatggttctggctgatcacatagcttttggcatctgttgttcatgtcatcaactaaatgacatgacacagagattaggcttttgaagctcaaagcaggattcttatagctagaagttgtttttttttttttttgttgttgttgttgttttcaaatttccaaccttaattttaacttcaggggcacatgtgcaggatgtgcaggtttgttacataggtaaacaggtaccacggtggtttgccgcacagatcattccgtgacccaggtattaagccccacatccatcagctattcttcctgatcctctccttccctccacccccacccttcaacaggccccagtgtgtgttgttcccctccatgtgtccatgtgttctcaccagctaaaagtaacttgactttctcactcctttataatcttttaccttttcccctgagaaaagaatgccaccaactaaatggggaagtatggccctagagaacagtgctgaggtcagcaggtggggccagcagagaaaaaggtgggggggctgacctcttttgtgcctgtcccttattaaggaggaaatcctttcccagaagtcaccaacagattttaaaaaatgtctttatctcattgaagttgggtcccacttagactaattcctggcagaagaaactgattttggtgtatttgacttaaagcaaacataatgtattccctaaaactgagtatatatccatcagaacaaaaccaagatatttcttgagcaatcagtcaacagtgttggctataatatgcatgtaagatataagactctgcagccttgtaaagctgcggtgaaactgagtttccaacaggtcagagagtgacgaaattgcagtagctctactccagggactccacagcactctttaggttgggaaaagcaagtgagttgcttttacaggtgtaaatcagagggatggaaattattgatgagataatcgagatgggatatgagcaggtattcagaatatatacggtttgcaaatgagaatgaagacttcccaatccttggagcagttcataaaggtatgtcaaagcctgcaggagcctaaggaagaatgtgctaacttttgaaccatgtagatggctcataagaaatataaatattgaatacacttttgctgctattagtggctgccttcatagttgtgctcagtaatttgcctgaagaccctcaagccttgcggtgttaaacattgtgattcaaaacccaaatctagccaaggccgtccatgtgttagatgcttctccaccccaggagacagggcctggagttggtctgtgtgcttggagctcatgaggcaatgacctgagctgcaaatcttcagctgtgcacccacaaagctgccccagaatcctagccatagtgtttcaggccagacctcaacttttcctcggatcatgggttatactccagattttgaactggacagctggacaacctttaggaaccctcccctagaactgggaaaactcctaaaccaagctcctgcctgacccactctccaggctccacctttcccctcttctttatttgtttatgatggagtcttgctctgtcgcccaggcttgagtgcagtggtgcgatctcagctctctgcaacctccgcctcccaggttcaaccaattcttctgcctcagcctcctgagtagctgggactaaaggcgcacaccaccacgcctggctaattttttgtattttagtagagatggggtttcatcatattggccaggctggtcttgaactactgacctcatgatccgcccgccttggcctcccaaagtgctgggattacaggcgtgagccacagtgcccagcctccccacttctttattaatgaagacagatgtcccagctcaagaaaagagagtggaaaaactcctccttcttctgcctttctgttctatccgggctctgaaagaactggacgacgccagcccacgtggctgaagacaatcttctttactcagttcactgattcaaatgttaatctcttctgaaaacactttcacagacacacccagaaataatgtttaaccagttatctgggcatctcttaacccagtcaagttgacacataaaattaacccatcacaatgtcattgatgaaaattgcctaaatacctccacccttgtgaaattgataactaccttgtctaaccacttagttaatgataagtggaaatgttgcctctacatcatgcaaaatgtgacagatagggaataaatgcttagagatgcttggatgaaataaagccttgtccagatgaagaggtttttgttttgggcatttgaccttgggaagcagttcaattaaaaaaagaaaaaaaaagtccccgtcagtgattttatagcacctggtaaaattgcaagtgattgctcacttctcccctgctccttcacccctgcaataagctttgttgtcggtcacagccttatgacctcctctgtgctgctcatctcacagagagtgtggagcaccctggaagtgagactcaaggccaccagccttctgcaatctccaggtctgtacctggagcaaactctactctgtctctctctctctccaagtttccttgcagaaggcactgctgacagaataggtgagacaaaatatagtgaaaagaggagctggtgccatccaatccagagagacaactacctggcctgcagtgccctgggcttgctggcatagctgggctcaactgaacctttcctgcacaacatctctattttgtgacctcactgtggcacactcacctctcaaagcgcttctgagacctcccctaatgtgaactaccttggcatgtttttttccacccctgcatattattgtttgtgtgtcactgttctcattgccagggcattgcattgggatttctttgtcagagcacataaagaggcgtatccagaataggtatccagccagcataaaacaatgtggcataatgtgttgctaaagtatatatattttaaattcttctgtagtagttggtaatcagaaatagtttacttgagaccacgcattatctaatgacgttggcccatggaggctgtggtggtggtgtggtcttgggagtggggctgtcttggaggtggacagaggtggaggttccaggtgggatgtgtgcaatgcctcctgctgctctggagtgggccagaggtggcagggacaacccaacagggtgggggctgaggctaaccttgaggaattggggttgggaccaagacaatggtcttttaagttcaagctagctgaaaagtgctggcttctgggtgatgcccagcccagacaccttcttttgtaaccagatgtagtgcactggcctgatgactattagcttaatgggaggtcaataaagtgtgtgaggctaaatcacagtgatgcagaatttttctcagccactttgccaacaagagacctccatggctggcgatatccccctgcctgggccttgctcagccccgggcctgccattggaggcacccccacccgctgagcttgctgtcctatagcttgtacccatgtttggcagttcccgagctcctgtcccgtgtccaagaagaatgaggatacactgacaattccaagggtgaggatgggcagagaagaattgtattgagtgatggaacagctatcagtggagaggggatacagtgggtggtcccccaacccctcagttgggttgtttatctcccagtgtggctaggtctggagctttttatggactcaaaatggagagtgtgtgctgattggtttatgagtgtgcaaaaaaggttaaaatgaagacaccactcaaaggcacgacagtgtagaaaactaattaggaaaggataggtatatgtaaaatagatgaagggtggggatcaatcagagaaaagtgcaccaaaatggaaagacaggttctcaatccagtctgtggatgtacccaggacttatagctaggctttaaactgtcttcggcttgaaggttgggtttcaatggggacccaccactgtctgcctagggatttgtctgtctcctgccactatcaacagctcagccacggacgtcagcttgggacatctgcccaaacgagagatcaccctagcaattcctaaaatcagaagtgtcaggacagttgggtaaacaatgctatagcttcagaaacttgctgagcagtgtgtgagtgtgtgtgtgtgtgtgtgtgtgtgtgtgtgtacagggatatgtatgaaattagaggaaagtttttaattactaatttatgtatttgtgcaggttgttgaattattttagtatcaccccagatatacatgcagcacagcagttattgaatcttttcagttactgagtcttttattttacttttccaaattttgcaagtatgtgaactacaactgctttctttctctatttatttgttttcttgctactcggtgcatgtgctgttgcatgcaccaagttaattcattttatttccctaacaaatgtcagtatctctccctccccctatgcagcacatcattgcccactcagcgtcactgtttggcacattcaatgtggaagacacatgggtgaatcattcccagcatctggacatttagagtcagctggatgctgttgggtgtcttatttttcatgcagatgtgaggcattatataaagcagccacatttgtattaatgttgaaaggtcctagggtttctgcattatgaaatgaaaaatagctattagctactattatctgatgaggtttgaaggtatgtagttctagaaggaatattttgaatggacataatttctcaaataatatatagtttttatcctaactacaccaaagattttgtcttataactgtgctagcactattaaatttttgtcctatcactagaaattttgctattttagacaagagaacctgactttggactatgatttatgtaatggaatttcgagtggtccattaaacttatttaataaccataaaaactggcataaaattagccataattcatcaaatcttacattatattcttagtctgggattgatgtttaatcagattttttattgtttcataacatttaatgggctatttataattattttctcaactatatctgatggaaaaatatattacagaagagtttttaatgttccagaaataaggatataaatatacaaacagtgctcacccacacaggaactaaggcaaagattgttgctgttataatttcagagcaaatcgattggcctttgtaagctatgattagtgtagacatcctaataacagcgtgtggtgaatgctggtcttctgaactttaacaactcctccaattcggccaccaataaagtgatgataataggactgaaaaacttgttctcacagtgataaatttgcatagccccatgcatatttgtggcttgaatttttcctccttcaaaatcccagagcaaaatttgaacaactttgtgtctttatgatgttataaattcttggcaagaaagtatagagtgatggcagagagcaaagcgaaactttagaagagaatattggcagaaacccttggagactggtcccgagctgtgtgtgcaagtggatgcattcatgcatgcagggcatggaggctctcagctgtgatgggacccaagagatggtccagggcccctggagggcctggaagagattggaaacaagagtcgagagtgttccctggcagctgagcaaggccagtcagcctcactgaaattcaactgcacaccagctttctacttaatatgttaattttgtgttccattttctcctgcaatcctttctgccagccactcttcgcttttacatgcttcatgttggaagtcattatttctgtcatctctaaatatttcatccaaggaagaaaagctaggatatgtctagagaacagaaactaagtttgtaggaagtttggtgggcaacacgatggactccagatcagtcaatgccacgtgagttctctttgctaacaagaaatcagtgctcatggtatcaggtgaacagccccccttttttttttttttttttgacagagtctctcactctgttgcccaggctggagtgcaatggcaagctctcagctcactgcaacctccacctcctggggtcaagcctcctgcctcagcctcccaagtagttgagactacaggtgcatgccaccacacccagctaatttttgtatttttagtaaagacagggtttcaccatgttggccaggatggtctcgatctcttgatctcatgatccacctgccttggcctcccaaagtgctaggattgcagccaggagccacttcttttagtgattttcaggattaatttctaggccttatgttccaccctgtgtctttcttttcaatcctagtttcacagcctgctcccttcatcggctcaaacttcatggtggtactttatctcctccaccgcctccaagaacggtatcttttcatttagtgcagttaattttataggctaaaggctctaaggttctaatacttgtattgtttttcactctgcacccattgtattttatagaggaaatatttttgatgtcccaagacagtttaaataatttattgttttggaatattccctggacacaacaaaatactttttgctcaatttttccatttttctaaattgaaatgaatttagaagtgaatatggtaaaataattgtataataaccacttgattttttagacccatgacctaatatcatcaaaacacatcacagtgttttgtgaattacaggagtatttacctcagatagagaattggattgtgcatttctaacataaaacatgaagaggggcaccgtgtatgcctgcctgattgctatgagatttaggaatcgtcctacctattcttctcatactacttatagttataagtctttactaaatagtggatgcctactaaaaaaaaaactgaattaaagcatcacatgattccacaaatatggatcagttccaattttcactattttaccctaattcaattaacagccttctacagtccagctgaatttcatctttatgtatcatcatctctaataaaacatttttactcttggttcatgatttatactgctctttatcggatactttacattcagttattgcatctctgtggtttcggatgcctgtgtagcatactcaatcatcaaaactgtaagaaacagggctgattgttatttctatgctcaagaacattttctttaattgctgtggctttcaggacatcaaacaaccaccacagaaggaagggaaaggaaatattagggagaaaggatgcaagaagagagtacgttaattattctcaaaagagcccatcatgctctttctaggctgtgctaggaaagtgtcctagattggcagcccccggtatgtgtatgcttctgtggccaaaacctgaagctggaataaaatgaagtgtttttttcttgaatctttacttgcaaaatttggtagaagggtatgagtgcttggctttagtaacttgaaaacaatttttaaaatttggcagttgtattttgaaactgttttaaaaagaagaatgactatatatctcctcagattttagggatggaacgttttgactgtgagttgtccaggttcttggtgcattgagcaaagaactaaacaaaatccacaaaaaatgcaacaaggaatgaagcaatgaacgaagtaacaaaagtccagctttactgaagtgaaagtacactctacagagtgggagcaggctcaagcaagcagctcaagagccccgaatgcaatgttctttagggtttctattaagctaaaagaatttggtaacacccctaggtgccctttcgaggcctccagttagtcacaccctatgaaagattggcccaccaccaatcagaggctgaagtgaagacttggcccacagtggaccagaggctgaggtggaaactactgttttgccatcacaggagtgagggcatggcctgtgtgctaatctttcctagaactggccgaacctgctgttttcttgcttatgccttaacccttggttaccctaaaccctattctcctgcctcaccattggttagctatccattttctattttcactcactctgatgagggtcccaactacagataaaccacttgactcaccaaacactgcttgctgaagtgagaaatgtcataaagttatctgagtttggctttgtactcttttatttgaaagagcgtgttcatccattaacccatccattcagaaagcatttattaagcacctgctgtgtgctggctttgctcactctgccaagctgtgaaatctgtttctctaggcggagttctgaagtcacccacattctgaatctcagtcttggaccaactgaattagaatgtctgggctggggcttgggaagttgggagtttaacaagatctgccatggtttttatgcatggtgagcctgctggtctcaattgaacaaatgtggatggaatgaagcatggattagtctgttcaggctgccgtaacaaaatccacagactgggtaacaaaaacaacataaatgtattttcacacattctggaggctggaagtccaagactaagtgttggcaagtttggcctctccttggcttgcaggtagctgcatactcattgtgtgctcacatggtgtttcctctgtgcacacatccctggtatctctgtgtgtggccaaccttcttatgaggacaccagtcattggattagggctcactttaacagcctcattctaacttgaagactctgtctacaaatctgattctactgggactgagggcttcaatatatgaattttgttggtgagacaccattcagccaacagcaaagcaaaagagtccactcttggccggcatcccaaattagttgaacctctgccatctcaagccagagctttgcagtccactctgaaattggtgggtgacctgtggaggtagtttctcccctgagagcttctcagtgcacagttaaggctctgaagtcctcctgagcagctcgcgaaactgaatttaaaccaaagttttctacaataatttcaccatgaccctctgatgtttgcaaaatttctgttctcaaacaggttgctcacttgtaaaatatgttgtttctccaagctagagaaaataaaacaagaagaagtcaggccccttcctgaaggccacccaaatgtgacttagagatgagatatcaatctgtcttactcagttcaagacagtaggaaaaacattgtgtatttacaggcagtagccatcagacagatcttattcctacatatctgagctgcactctggaattttatcatattaatctctagtgtctcttcatctacccaccccgccactcatccctctaatagaaaacagttttagttcactccagagactgcagcaggtgccaggagcctgaaacacacagcagccccagcctatgtatcccagagccctgagtccaggctctatgctcttatcaaagcaaatacagagcccatcactgggtctcctgggaggccctctgccctggtgattctcattctcatcacacatcagaatcacaggaggctgtaatctttgagaggccaaggtgagccaattgcttgaactcaggagttcaagaccagcctgggcaacatggcagaacccccaactctactaaaaaaataaaataaaaattagctgggcatggtggcaagcacctgtggtcccagctactttgggtggctagggtgggaggatggcttgagcctgggaggtgaaggttgcagtgagttgaaatcacaccactgcactcaagcctggatgaaagagcaagaccttgtctcaaaatcatttttaaaaaaatgaaaatagaattacaggagagcttgtgaagaggcagatccctggacttcattcctcacctctggaaccaaaaactcctgtaactgggggcagaaaaatttctctttttggaagctctccaggtgattctagttctaaaccatggctctttccggtgtaatttctcagtactcctaatgggtgcttttaactatgacctagatcagctgctccctcttgcttgtgctggatacatacttatcgtgcctctgttccagccatgtcaccctgctgtgctctccgcctccagtgtttcttcattctttagactagcacctgcccctcttcaccagggaagcctgcatcatgaggaacaccagtattgaagtcttcatctctgtgttccttcagggctgtggagtccaacagccagggcccagctgtgccagtacaagatgtatcaccctggacaaatatttaccctctctgagccttgattttcccatcccaatccacaacaggaatacatgaatataatctttgtttttttttttttttttgagacagagtctctgtcacccaggcagagtgcaatggcgcaatctcagctcactggaacctctgcctcccgggttcaaacaattctcctgcctcggtctaccgagtagctgggattacaggcactggccaccatgcccagctaatttttgtatttttagtagagacggggtttcaccatgttggccagggtggtctcgaactcctgacctcgtgatccacccgcctcggcctccccgtagtgctgggattacaggcatgatgagtgtaaactttgaaatacatattaacttggcttttatcagtgtgtagtaaggctctccatgtcagagtaaataaatccaccaaataggagtcaaataaattcttatctgaaaatccaagccttaagattaggatattctagaacttctcttctagatattttcaatcatgttgaatctcttgtgttacatatttaagagaaggagaaaagaaagcttcttttgaaagcctgtgaccaaaagaaagaactggaaccagcaaaagcaaattggtttgttttcactcaaataaccgtctgcttgacttaaatgtgatctggcaaatgggcattgctacaggaaacaaaaggcttcttttgagcttctagagaaagagaaagcatcctgaatacttaatcaagataccttttcctacaattagtggaaaccagctcatgtctgttttctctcgccccgtttccttgtataacactcatctagctgcttccgtgaggtagatttaaacgtccaccacccagaccacacccatggggccaccaacattctagagcagcttgctctgtgcatcttatccacactgccatgcgctctgtttatctcattagaaaaacccttgcatatttactaaaggcaagaggcaaaataaacgctgagttacatatgtaaaattccatgcagcatcgttctcctatgtattactaggtttggttattttacatgaagacagtttctttttacacaaacagtagggctcttatgcagttgttctctttcaacatgaacacaatagactagataatgttgtctgtttatatttctttccgaaagtaggaataatttcctaaattgctttcacgtactgtgtaaaacaccgtagaagttctgaggcttatctgacatctcattgtcccctggtgtgtgtgtgcgtgtggtgtttttgtgtgtgtggggtgtgagtgtggcagagaggaaaggggagctgtttgattctgtagttccttttctgccttcttcctttctctgtaaactttggatacttatccaaattactaacggcagattgagccctatgcagatggcatgtgtctgtgacaacctctgctctccacatctcttgggcctgtttacctgcgctcccagagcctccgccagcatcccagaatctccatccccatctctcacttatacacacatcagtcatcggttatccattagctaaaccgccttccttaatagctttacactgtttgctttctctggaacatttttagttaaaatttcataatgcagttgcacacaaatgaagacacagatggctgcatcctccgtctcttcccctcgtttacaggaagctgcggatcagggaggggtgttagggttacccacatggtaagggcagagacaagaggggaccccagttttccatgctgcacatggtcattgctggggactgaggtttgcacatcaccctgccctgttctccctccgctggggagaaagtcagggatggagcaagctgcagcatcttctgaaaaagaaaaggtggccttgtctccaggtctcccctcaagtcccaccttcccatagttttctgccacttctcttgattttcctctctgccacttctcttgattttcctctctgcagctgctttgaggtgggttttctccagatgcacactttcccctgctttgcgtccttattctggtagaagcacaatctaaagctcattaagggaactaatcaattctgtgcatggcgctagctcagcagatcaccacacaggcagcactattagcaagtcggtgcttaacacatggcacttccatgaatcgatatggagcccgtgtagaacaaggcatgggtttttttctcctcccattaagaaaaactgatgccaaaaataacttctcagatattttcaagtatgacttttatggagggaaaaagcatttttgtttgcaaaatcatgcttcaatgcaggccagttgtgaattgtgatggcttttatttctcctggggctgtaactttaagggtttagaatttggaaccacagcctagctaatcatgacacacacacacacacacacatgcacacacatacacatacacaaagcatcacgaagaaccatacaaattgtacattattttacacatggaggctcactctaaaatagataccattttaaatattaactaaaacttgtgctcattgtatgttcattctatatgtactgatttgttattcacatttctttcaaaatcgttcaaatttctagcccacatcaattaaatattaatagtactttctacaaacatgagcgcacaaaataaattcaaatctatttttcccactggtgttatcagtactgctcatactttgtcagtatctaagtatcacatgatcttaaaactaatgtcacatactaaaaagcttctgaggcaaattgtagaaagaactctcaacatcattgttctactggacaacatacataaaattattttacagtgatgggagagaaataggctcctcatcctaaaagctgcgaagacagtagcggtgccgtgttttggcgttactcccctgtggatcccagcgacgggtggatttctcctgtgctttatcatcagacacaaaatggaccaaaatggaccaaaatggacgagtgtgagggacacagaggctgctgtaaaaaaaaaaaaaatgcaggatatttatgggtctatgacgacccaaataatgagcaaacatgggaatcccctgctgaaaagctgtcacagaactgaagcctgcctggaaatatcttgagaatgttgatatcattttaataggatctaaaatgagaattctatcaatataaaacagggagaagggcctccttctatttttaaaaatacccaacattcatgtttttcatattttcctagcctataattactcttaatcaaagcacaacaaatagtaaacagtaaaaatgaaataaatgtggtgacagtttgccaataacgaggagaaaatgtcccatctgtctagccgcgagtaaaatgggtgtaattaccgctcatttttctcgtaattgctgagttattagtttaaagcttacacacaactggtgaacagtgagtactacccattccgtaattacagccccagcctcgccgtgcttgaaatcagggaatgcaagagcagaggaaacgatctgaattaaccctgactgcttgcacagaattgtgactgtctatcttatatttaaattttataaactctgagttcctttgctatccaaatgttaaactggaatgtttgcaaatccagcttgaattctaatttgcttttaagctatagtcttgcatctgcttctaatggtgaatgcataaattcatttttgatagaaataatccatgcagaccaccaccctttgcattgcatttgttaaagttatgcatggttcactgatatgcaggggtctgttagcagttatgttaccatctcgttaccagggaaattccatttgaaagtttaggattacacatgggtagtcaacacctgacgtacacagcagggcaaatacagaaaaaagaatctcccttgattgtttctgtttattacaaatcaaagattaagacaaatagagctgtggtttatttcttcttccagtatgttattttatctctgagattcacctaagaaagactaagttctatgatgttctcatagaactatagctacttttgcctaaaatgctgatatcattttaataggatctaaaatgagaattctatcaatataaaatgggggccgggcatggtggctcatgcctgtaatcccagcactttgggaggtcgaggtgggtggatcacctgaggtcaggagttcaagacctgcctgaccaatatggtgaaaccccatctctacggggttttttgtaaaactacaaaaattagccaggcgtggtggtgcgcacctgtagtcccagctacttgagaggctgagacaggagaattgcttgaacctgggagacaaaggttgcagtgagccaacatcatgccattgcactccagcctggctgacagagtgagactctgtctccaaaacagaaaaagaaaaaaatttatatatatatatatagatatatatttatatatatttatatatgtatatatttatatatatttatatatatatttatatatgtatatatttatatatatttatatatgtatatatttatatatatgtatatatgtatatatttatatatatttatatatttatatatatttatatatttttatatatttatatatatttatatatatttgtatatatttatatatatatttatatttatatatttatatatatatttatatttatatatatttatatatatatttatatttatatatatttatatatatatttatatttatatatatttttatatatatttatatttatatatatttatatatatatttatatttatatatatttatatatatatatttatatttatatatatttatatatatatttatatttatatatatatatttatatttatatatatttatatatatatttatatttatatatatttatatatatatttatatttatatatatttatatatatatttatatatttatatatatatatatatatatgaatgagaagggcctccttctatttttgaaaaatacccaacctttatgtttttcatattttcacattctagcaaaggtagattttctgggttacctctctttggggtcctgtctttggtctatacagggaactgtaactcaccacagacagagatagtgctgagatgacaaagctgggcttgattccgcttggatccctggcttctcagccattcctgatgaaccttttattagctgcctgtctctgatccgggaacactgatgacaggtgcgtttattttgagggagcatatcctcaagctatggagtggttgttgaatgagatgttgtgaaaaaaaaaaaaaaaaagtcatgagacccccggccaaaatcctcagactagcgtggcattttttttttcctagcaagttatgtcatttaatttatagatatagaagtggagacaatgaaaatatagcatagtatgttcatttccttcctctgagcctgagtgatgccaaggcatatttttctatgttagagggactaccctggaaaaaggaatggttatagtaaaatttggtatggaagattcactgatacgaatctcacattttcggaaagagaggagatgaggaaaggacttggtgatgatcaaatataacctaagaatcaaagttatttccattcctggctgcagaagcagtgaaccacccccttccttcttccctctctttctttctctctctctccctctctctctaatatttaacctcttggttgagataagctggtgaaaatcatggaaatgtatttttaaaatcttcattctaagcccccgagaaccacagtatgccagattcctttgagctccgcataaatgtcttggctccgtgaaccacgtgcatcttatgcataatcctttggttgtgcgcgccagctgggcagcagagatagcgagtgctggggtcttgcagctttaaaactgtgcccaggcctcactcagaagtaggaaaatgaaatgagcatttgcataatctatctcgagttacccaggtttctttcaatcttcttatcacgtttttaaaaaaatctattaagagaatattagaacaaaatgcatttttctcttcagagaattcattttgcctgcgtgtttgggtcctatagggcttttcatttgttttagttttttaaaatgccttaagaaaaatttttaggagtttactttgttcctactcttctctatttgagtcagcaacacatatttagattaattcttttgacttggaagtgcagttctgagcgattacaaaatttttatctaaaaaggctctaaatgaattgaagttgtgaaaattgtgataatttatttcctggaattgaaatacagagagaaactaaaatacacaccacattttaattcagtgttaatttctcccatttgcttataaaagaaaacatggtgcagatcttgtgtacttgaaataactgtccacacattctcaatccacagtcacgaatcagacacacacacatgcacacacatgcacacacacctgcccacgcacacaccggcatacactgctaaagtaacaagcttgctctccaggcctgtgctgccaaggctggctggccagactgcctgcctccctctctctttctttcttaactagattattttcattaactctactttctaaatctttctttacctcggtagcaatttgcagctgcatcatttactgacacgtgtttcttgaagttccctagcaggcactgagttttgaaatccagcggtctccagtgtctggcccgcacaccagcatttggtactgctgccctgtccttttccctcctgctgacatccctccctccaggctgtctgctgtgtgtcttcgctttctcttctttattttcccctttctctcctgtcgatgggatttcccttctttcttctgccttgtctgtcccctctctgtgtcccttcttccttgaatggtgacctacctctctacaggctgttcccagatgccgtcattctttcatttaacacagaagtactaagaactcatctgtacctggtgctattccaggggctggaagactacagaaaattttagagagacaaaattcctatctttgtgaaacttatattccagtgggagcaggcagacaactactaaaataaacatgtaacatgctatgtttgatgaaaagtgttgtagagaaaaataactcaaggaagggtgatagtaggttgaggctgtttaatgctttaaacaggatggttggtgaaggtttctgagaggtggacgtgggtgcaaagacaccctttcttctcgctcagttattaccaaaacggaaaaatcaccacgtgcctgtgctgaagacaaccttgtagatacacaggcttcaaatgaatacactgaagttcacacatttctttaacctgggatgtcccaaatatttctttttagatttgtacatattttgttttactgatagcttatttgatgtattaagatactattacagagaacaggaatttctagggcatattgggaatgaaaagtatggccatcgtgttgcatctgagctgtgggtccccatagaaatgtgaagagatgagggaaaaggataaatctttggaggaagagtgttgtaggcaaacagaaccgtaagtgcacaagtgggagtgtagtaccactgcatgctggtagaagccttggtagtgaagagctgagtggggaaacacggttccgtcacaaagtccctctgtgtgcagacagaggctgatgccagctctatgcctactgccaaccgctgccaccaaaaattacggacagaacaagaggaacaaaagccacagagctggtctgaatctcattcctgaaacatctttcctcttattgttttcaaactttctgtgttttgaaagttcttaaatgtaactcttgtgcttttactcctccattaaccgttcatcaagtcgtctttcaataaagagacttatatgttgtgtctttgagattcctttatattgggatataaaggagcatatcccactaaggaataaatagctgctaggctttctctttctttctatttgttaggctatgttcctgggtcgagaataagaaatagtaaaccctttgtgtcctccctttgggagaagaccaccttatacagcaacaacatgggatctctggggcgcatcattccctgggaggcttcccaatctaataggagactgcctccctttgggaaaagacaaccttgtgttttctgtgtatggttcattccaagttacacacatccaagcatcttacaccattgaacacgctctcaaaattcactccaggcatttgcgttttgactccatgcatccccatcaaacagttcttagcctacagtcctgacggaggcccatctgagcagccatcttattctcaatgtctagctaacccctcctttcttctcactcagttattgccaaaatagaaaaatcgccatgtgcacgtactgtacgtggctgtggatacacaggcttcaaatgaatacattgaagttaacacattctttaatgtgggatgtcccaaatatttctttttaaatttgtacatattttgttttactaatagtttatttgatttattaagatgctatttactgagaacagcaatttctaggacatattgggaacgaagagtatagccatcttgttttatctgagctgtgggtccctgctcttgcagagagatgtggaactgggtcttgctgtgagatcttgtgaagtcaccgccttcctctcaggaccaccgccatttgattatacgttgtgtgcattccttcacgtgaccatgtgccagatgcaatagaaaaagtcgtttcagactgccactctctgcttccaaaacccaagtatcacattggttggaatcgatgaaagtaactgtcacccagcatttgtgttcgctggtgatgatgtattaaatagggaagaaccacaggctgggaggacatcagtaaacaacctaaagggggttttaaatagcaaatcaatatggaacaacggatgtagaaaattaccaggaaatggataattaagttcctgccatgctcttttacaaaatctctgagaataaattctcttaggacaaataaagaggaaaagtgatgcccatgaaaaccttaaggaaatgattgagtgttggtgcttaaagtgatggagtatcggtggtgtcatagtgtgcaaagggaacccacagcctcttgaagggattcgcacatggtcacgtccatctttccattccagtggcgctgggcttcctgtggatgcagcacagttaagtgtagtggtctttctaaaagcaccgcacaggtgcttgtcaatcaacgtggaatgaaagccaccggcctagggatgaagagtgagtgagacctcttgcattttccgactaagcaatttcagtgctgtcgtgtgatcttgttattccaataagcaaaacacgttattttattttgggctcagtgttggatatactgaaaacaatgataataaccagcatttactatggagcacatactgtgtcccaggaactgtcgtgtcctttatatgttttacctcgttactgagtgtgtgtgtaaaacagctctttattatgtgagcagaacaactccccaatatatgtgtgatagtagtgtgtcttttaatacatttgtgtatgcatatgtatatataaaacaactgtcctctcaccctccccccacccaatttccttttattcttgtaaacgactttctctacctcttcatttttttatttacagaatgacaagtattcataaagccaggtataggcagattctatcagttggctacaatagctggatttgtcttgggggtagttttatttattattttgccctcctatttctgacaggctcatgaacccctgagcactggggtcagcatagacctggtcagcagccttggaagccagcatagctctttggaggccccatgcccagggcactacccttgcaaactcagagctgtaaaaggatgccctcttcaactgcgtggacgcgtgctgttcaaatgcaccttctcacagaacctgtgcagtagcgcagggaggcagactttgtcagaattgtacccacattttactaggaaagcaccaacatgcagacagtctgaagaacttgcccatggtggcgaggatagtgtcaaagccatggcctctgttgccatcaccctttatttttccttctgcaccacaagcccatgtctcctgatatgactgggaagcctcatggggagtgaggttccccacagagatcagatgtgttgctgtataacttcctactttgggacagagataaaatggatgacttctttggccctcccagtcctgagattctatcatccagattcattccagtaaacatggaacaccacctaaatgtgctggagtgaacagagtgattgtttccatgactgatttcagtgtcttaattccttctcaccaattccatgactgtggggcctgagggacaggacaaaagagtagacccaatactgggaagtcttattgggttgcaggggtgctctgagtcagctggaggaaaacggtgaatcacccatgcaagcccagaatcccacccaaaaccatgcccagaattcagacacattttattttaaagaaataacaaaagtggttgaatgaggcaagatgtgggagtgaaagactggacctgatggtgacagctagggaaaggaatctgagctgctagagcagttcagtagctggctcaattatcaagcggtgagatttgctggcaagagtcaaataaggaacaagaagacaaatgacatggggcagatagagctgcactgtggcagagctgatctgcaggctggtggagcagaggaggggagccactgagccatgcagagaggccacgtataagataatacgaagtgacttggccaaaatgtgtaagcacagaaggttcattgctggcatacacaatttctgctacataacatggtgtccttaatggccataactgctgaaaagcacagggagaaagtggatgttatctaatttataaaatgataatacttttattatccagattgatgacagatgctccaacccccagagtctttctctccttggccccttgacctgaattcttcaagcggggacttcgtttcatagcctctgagcccattctttcttcccccaactccctcaaaaatcaaattacattgtaatgatctgtccacctttgggtgacactctaccgtgttcatctgagactctctccagcgtttttgtttgtgtccaggcttccaggaaagctgatggggtctacatgcacttttcctatatcccccactgacaagtacagtgaaggccgaatgctcagtgaacagtaactttctgccctaaatccaggtgggtgatggatcaacactgaacttttatttatttatttttttagaatatattactttggctgggcgcagtggctcacgcctgtaatcccagcacactgggaggccgaggagggagaatcacttgaggtcaggagttcaagaccagcctggccaacatggtgaaaccctgtctttactaaaaatacaaaaactagctgggcatggtcacgtgcacctgtaatcccagctactcagaaggctgaggcacgagaatctcttgaaccctggagacagagatttttgttgtggtaaaatatacataacataaaatccacaatttgagccatttttaagtgttgactatacaccatttaaagcaacaaaaatgtttgcaaattcgggttttatccaacaatgcatgcatttcctgtagattttattctcacctcacctctgtatgaactctctgcctctgcttctgtcaaatgtgtccgttccctaatattagacatactttgtgctttcctgcttaattaattgtttatacagcccttctctttccttttcacttctgctttcctggccaccacacctcttcctgttgggctccatggtagacatccatcagcatttactccttgcctcccagggaatctaggtcataaagggcaccctctttgtttatagcacttaatagtaattgtaacatctctatgttgtctatattgtcatttacctcttctattaactattcacatgctaccagataacttcttttattaatctgtatgtatatgtcaggttctatagtagatgccaggtctccaatagtaaatatgaatatgattattaatattaaatatgatttgtctccttttctcatggaagttttatactctggacaaagggcagacattgaacaatcactgtatcaatcagaataggctatgttgtggtaggctaacaaccttcagcaccttcgaacaacaaaggctgattaatttcttgcttactccatttgccctggtggctcagctgtgactttcatggtccttactcatggaccttccacactgagggagcatgctgcatctggggaattttggatatcaggagcactgagaaaaagagaacacagtaagtctcaaactagctcttaaaactccttcctcacttctcctcttgtttcattggcaaaaacaagtgacacggccagttctggcttcaatggttgatagatatgtaatcttcccctgaggagtttgggtatcgtttaactggatatacaggctatacatacaaatgcacaattgcacatttttatgagactcaaaacccttccaaagtaaatttgattacttctgtttgaatttggttttgaattttctagaattaaagggttcgaagaaatgtataaggataatcttgtccaatcccaaatggtttgacccatgactctcaatctctgggcctctgcataagagtagagactaaattattttataggacaagaagtagagtaaacatcctaagtgcttgccatagagtaagtaatatcacacacacacacacacacacacacacacacacacacacacaccacacacacacatactacacacacatacacacacaaaaagatagatatatagggctgggtgcagtggccagggaggccgaggccggcagattgcttgaggccaggagtttgataccaacctgggcaacatgtcaaaccccatctctccaaaaaaattacaaaaattagctacatggtggtgcatgcctgtagttgcagctactcagtaggctgagttgagaggataacttgaccccaggaggcggaggttgcagtgagctgagatcgcaccactgcactctagcctgggtgacagatcaagaccctgtctcaaaaaacacaagaaaagatagatagatagatagatagatagatagatagatagatagatagatagatagatagcaagtgcttataccatggaccattctaaatgtttttcatctattaactcaagagtcaacaaactttttctgtagagtaacagacactagatattttaggttttgtgggccatgagatctaggttattactacataactctgccactgcagtgcaaaagtggccacagacaatacataaacaaatgatcttggctgtgttccaatacggatttatttacaaaaacaaacagtgagctggtttgacctctgttttaacttagtttattctgatgacaaccctactgttatccccattttatagaagaagaggcctgtagaggtacagtaatttgtagaagtgcagttgaggcttgtagaggttcaatcatttgtcaaagttctctcatctggtaagtgggggagccaggctttcacaaaggcaagttggctccagggttcatgatcccaactgttaggattcatttcttctctaataatgctactctgctgaattcagttaagctatcgaagtatggatcagaaaagagggttgggcttccaatatatttgctcattttatggatgatcttttctgtctacaaagacaaaagacacaaattatttgtggtttcattgtgctggggttgtgtgatttactgagccacactaaatacacaacaaggtggtatacaaagtggtcaaatgtaccatctgaatcattcttgacatacacggacacacaactttgggggtcttcaagtttccttctacccttcccagcagggtagaagagaagacaaaaacacagcagaaaaactctgtccaagaatgggaaagagtagttatggcatgcttaggtggtgggaaacagctgatttaaagttagtaaatctgaatccaaataatggttcgatttctctgtgcaaccatgcttaaatccccgtgcttctccaaatcggagctttcacgtctgaatcatggagatagtatatctactaacagatgtgctgtgaatgataaaggagtttaagtaagtgcaagtgttggctaaattacagcatcttatagatatatgtaaagtcatcgctattactggattgtccttagaaataagggttttgcttttgttgtatttcaaggtgacttaagtatggttgactgcatatagaaaaggaagaatccaaacatgtactcgctgtaattgagtctttaaattgcatatttaaagaaaattactagcttttaaaatcccaagtgattttagagaagactcacagaattgttaaggctttccacaacatatttactcatatagtgggggtggaaggagttggatttgcccttgtggttttcatagagttgacagcttttcttgcctattccacaagttctaatgctacataatttttaagatttggtccactcagctatcactgtgatctcccaacttaaatctgttatcaatttttcagtcctctcctagttctttgcattcacttctatttgccacaggttattagagttatttgtccattcattcaactaacgtgtggctgtctattatggagaggcagtgtactagatgttagggacacaaagctcatgaagtagatatggcttctgtcctcagtcggtgtatctctcagtcagaatctgttacttgagggggcagctggagctctttctcccttcctagtaggctgagcatatggaaaccagattcccagttaattttagttgttgttttcttgatacgtaaagaaaagatccataaactcaagatgctttcttatgaatcaagttttcaagttttatagcattcgctttgtactacttgttttgaccccattgagaagttttatttcttctgttctcctgattcttcgccattttagcagcaaatatgtacttaccatccactatgtgattgatgctttggaaatacaatggaaaacttggtagcaatgaaccctctgcctttaagaagcttatattctattttagattagggaagcaggaaggtctctctatgtacaatagaatgggaaagaacgagccacataagtggtgtcaaagaggaatgcaaaaagacagcatggctggagccaagtgaaactaaaaagaagatgaggttgactagagacatgattcagatcaccagaggctgggaggcaatggagagcattttgatttgattctaagttcaatggaaagtcaccaaagagttctaagaaggagtataacatagggtttgacacagtgggtgggtgaagaagatcacacttgctactagagatggggagtacgttgtagaggggaaagtatgggtgcagagagatcagatgggggttatttcaggtgtctacataagggatgatggtgacctcaaatggaagtagaggtaagtggagagatgtgagatacattttcagatagcaggagtaggacctgctgatgggtgtgttgacatgggctgagggcagggatgaggcaggaagatggtaaaatcaagaatattcctgggttgcgcaacactcctctgtccactccctgtgatgcgatttggcatttcccaactctgccttccctcctaaaaatcaggaatcggtcttatattaattttattttgggttctgtatctgttgaattccataaacatctctcatttttttctggttactcattcatctatcagaaattgtgtaaagtccatattttttcaaatttagacacctaaataataaagatttaaactattaataaacatgtacttaatttcaaaaagagcctgctagacataggtgaatagggtttcccatttcccgagaggaggaagaggtgaggaagattgtgtggggaaaattgagaggaaaatggagcagtagtaaaggagaatgccagctaaagggaattttgttttgttgttgttatttgtttatgtgttttttgtaaagatgagatacagtagagcatgtttgcccagtgagtacagtgatccaatagagaataagctgtcgtggtgcagatacaagaaagataaaagaacagacgtaatgacatccttgagaaggccacagggtgggggctttccagctcctgcagcaggatccgccttgagtgggtgattggggtgggtgcagggtagagagagattctaactgagcaagtttaggatgagggcttgcactccagaaaaggctggagaaggcactgagagagctgttaggagggaagccagagatgagaaacatagaatctcatctcagggagtgaaaaaggagactcctagacacaggatggtgggcctttgttgagcgactcttccatagaggaaagtgccggatagctggtttctggagaatttaagtattactgtattatacattataatgcatctttgtataatgtttttctcttattccccaagatctttcattttcttttggaaaatgtggacagttagtctccatgtatatctctgtggtttcttactcttatattaattttgttttgagttgaatatcaattgaacttcatcaacatctctcattttttcaggttactcattcctgtttcagaaattgttcataaatgttcattattttcacatttggacacctaaataataatgatttaaactaaacatttatttaacttcaaaatgtatatactatttgccttttttatggtgagaatatatttgtataatacctatttatgtcaacacagcaactaacataataaatatactcttagattataaaagctcactttatataatcaaagaattttctttatgttataaaataactggtatgaatatgctatttagattatcattcaattacttacacctcatttctttcaaaatgtattggagatatttcccaatttgcaggtgcttggaaggttggagtgatgagtgtgtgtttgtgtggatgtgcttttggatgtgtatgcacacaaaggtttcttctttcctaatctaatatttcttttttcttttttggcctgacttctatacacaattttcttagcccttctggtaggttatttaggaactcaaaagtgctgggtattggctttcatgtcctgccagccttccttcttttctttgggagaatgttctgcattccaggagaccctgctcccaagcatcattcacatggtcaggctgtccaggtgcctctcaccccacttggagatgaggctgctctgttttcctactttggtaatccctgcctctgttctaagggcctggccaaaacatggaaagtcttactcttttttcaatccgatcttacagcagtgctggtgacattttattctaggtagatgtttgcatgaggcagttcttaaaaaaaagtttaaaaaaagatctttctgtctctgagcttttttcatctatttcctccttctgtcatatttccagaaggtaattgagagtcagttatgttttattttattttaacccagtgatacaggcaatgatgagtttgcatgttagtaaaatgggaaaatgagatgtgtagaggctgaggggcaaaatgagaatcggcacaaaaatctgattgatacaacattctgtgagaggcaagaatgtccctgttaggcaggaagccctgggtaagataacctggaatgggtgtatatgatcagaacacagggcaaaaaaaaccatcctcaagacttatcgccatatgaagactgaaagacaaaccaaccttctgagtgaactcactgaaaaaaatcttgtgtgcctggaaacattctgaaaggggcccctcccttgggctataaaatcaatggtgaatatcattatcaaatcagatatgggtaagcttttacagcatccagttcccagtgactatcccttaaagaacaaaacaaaacaaaaacaccactatccgtaggcaagtgttttctcttgaccacatatttacatatgaaagtctattctggggaaggacagtgaggaagatggaaaaatcaatgaaaagctccctctttgaatttgtagaggcctttctttcaaaggtgagcccttctgcacagatttgtttgcagagacccacacaggccccatatttatttagttcctatttgaaaagaagctttcctcctgccttagaagaagctcattacagatagacttcacctttctgttgcaaaagatgtttccttgaaatgaaaatgtaatgagtgttagatcagtagcatgtagctgccaggctatctctttgatccagtttggaatgcatttgttaaaaagctgctttattgatttttttagctgctttttgctgtgtttggatcatttgtacatatacacatcacaatttttgctacatcaaagtgcttaataagttcactgcactcaggaaatagcatacaaaacaaaggaactttgctctataaagatttctgcctcttaacctccagtatgaaagttgtttttaatgtgtttttttttttctgaatagcttcaaaatattttatgcagtcttcaatgagtcagccagggccccgcttcagatctccttctttgaaaatgatgcattctggaaaaggaaggatttgattgaacgagtaaacacatctcacatccattctgctggacaggagtcattttacttcaattaattatttaattggctcaatttgtgggtagcggcagcttccaggaaagtgttgacaatatttgatgtatgtgaggatagctactaatttagtaataagttgaaatttactaggtaactaatgtgatgtttgtttattaggtccaattatatgacaaagaatgagcacattataacctttaatgctgattttttttttttttgtatcatgtacatacaaatcagtgttaagtgcttttaactctaaacaggtatttcctgggggcagactcggagccagctcagtggaaagcacgactgggaagacagagctgagtttgctccacttttggtctcaggccaaaagtgctgactgtggtcaagtgtgggctgcacagaggagctgtccaatccagctttccaactagacccctcgtgctggtattcgggcaggctatacctcctgcagatgtacaaatgaacatgcattaaagattttatttacctcattcagtgagggagctaggaaaacattataaacagttgaaatggggatcaaaaccaacatttatttgtcagtaatagtgaaatgaatatgcaaatggagtcaaaactggtttttccatgggaatggtgtcggtggggagggaaaccaattaaacccctatgacaggtggaatttatggtgttcattagttacctacagactataggtttgtaaaatagctcaaagacaatgaaaacttagaatgtgataacctctagagtctagaaattgtggcgcttcccattgaagcacacctttttttgtacacctccaacagtggggcggacactcaaatccttttctttttgtctttaaagtcaggaaagtacgttgacttcaggggtcaggtgaaggtcaaggggtaagaaaataggaggcaggtgataattgtgggcttccagtaatattctggtaagtgaaaaggaaacatgacctaaaatagcaatgcatcaactgagtatttaaaagtcttttgtcttttctagaaattttgtcatcgtggtggtagttgatgtaaaaagtggttttcctactttgaattttatcttttattctctctctctcttttttcccctccctcctttctttccttccttcctttcttttttcttccttcctttccttcccctcccccctccctccctcccttctctctctctctttctttctttcttttccatgacctcattcagtgccagttcacattttcatcttgatccatccctttgtacattggactctcaaaaacagcaattcttaacagctcaattggatttgccatttggggccatctctgtacatggcctctaaataaatttacgaactccccttggtgcaaaattgagatatagatgaatgggtggctccctaagagaggaacggggacacctgggtctggtggaaccatgtcctgaaagcactatatgactttggcaaacagcactcttctctgggtgccatcccatctggtccccaagcagaagtcagagggtgcttagcagccatggcctggcctggctgcaaagggcatccagtcagcattgctttgtacactggagctttgaaccagtgatcctcaagcctctccagtcaggtcactgggaatttatactttcctaaaatgtccgttttcttgctgtttgcctcagaatgaaatctcacctcatgtgatagtagtcatgaaacccaaagacacaatgtggagaggagttcacgagaatgcctggtatgaggagagcaccccaaatcactctttatgagctcatctcaaatctcgggctccacttatcccacggtagtttttttgtttgtttttttgtagttataaagatataatttacatgtaataaaatttatttttaatgtgtatttcttcttttgaacatatgcttagagtcacactacaatcagataatgtttctgtgggacacccaaactttcctggtgccccttttttgtcatttttatccctggtctcccaactttagtaaccactgttgtgatttctgtctctatattttgctttttctagaatgtcatatcaatggaatcctagaaatgcaaacttttgagtctggcttctttcacttataatgcatctgagatccatcaatgtcgtcacacgcatcagtgcacgctgagtcgtattcccttgtataaatggaacccggtttattgtctcacctactgaaagggaggttgttgggttgtttttagtgatgggacatcatgaatacaaccagtagaaacgttcatttacagattttttatatgaacacagtgtagtgtttctgaattggatgataaatacgtgtttaattctataaaaagctgtcaaactgttttccaaaatagctaatctatttggaattctcactagcagtatatgagagttccagttgttccatcatattctcaccatcatttggtattgcctgcctccctcccttactcaatcttcttttttcttttctttttttccattatattctcaccattatttggtattgcctgcctgcctgcctgcctgcttgccttcctcccctccctccctctctctcccttcccttccctttttccttccttcctttcttttcctttcctttccctcccttccccctccctcttctctccctccctccctcctttctttctttctttctctttctttctttctttctttttcttttttctctctctttctctttctttctttttcttttttctctctctttctctctctctttctttttcttttttctctctctttctctctttctttctttttcttttttctctctctttctctctctttctttctttttcttttttctctctctttctctctttctttctttttcttttttctctctctttctctctctctttctttctttttcttttttctctctctttctctctctctttctttctttttcttttttctctctctttctctctctttcttttttctctttctctctttctttctttttcttttttctctctctttctctctctctttctttctttttcttttttctctctctttctctctctctttctttttcttttccttctttttctctttttccttttttcttcctttcctcctttcttgccattctactagatttcatagtgttatctcatacggtttaaatgatattaccttaattactaatatgttgagcttttttttttttctttacatgcttaaaatcttctctgttcaagtgtctgttcaaatcttttgactgggctctctttcaaaagctttccaattcaaattctatctttccaaaaatatgaattcattaagtctagaaagtatcgatcggcgtatttacaatgcctgtggatgcaatggcgaaacaaactcctagaacagattattttgtagtaccttaatacatagatattaaagcagtaatcaactcaagccagagtggattcactaagaatgaataatgtaaagggacccatttcctttctttttcatgaattaacttaattttatattagaatagttgaatagatatattttatttcatgcttgtgaacaaaatggagaaatatgaactgcgtaacaataggtaaattatattttgttgaaaaactattaccccaacatattaatctttttgaatctgtctagctggaggaatgttccttagtaattaaattcaaaataatgtaatcatcaaaaatattccaattaagtcaacaataattgttttataaatattattaaatgtgtatattttattcttattttagaaatatcacatattataataaatctggtatagtttcatgggagaaggatcctctgacattcatctcagaatgctatacttcacttaaagtttacttccttttgttatattaaccccacttcatgagatgctatttactctactttttttaaatgtgtatgcctcactttaatggtgttgcttttgttttttttaaaattgcttatctttatatttgagctttccttttacccggtgggtttaagtggcatactgcttgcttcagcctatttcgagtaattctgaggtagaggcaggacagattgcgaggcctgtcatgccaggagctgcaaagtctctccccttcttcctgggtcttggtagacacttgagtttctgccatgttgtcccttccacctccaggcgctgctcctgcctgagttctgcagccaagtgccctgtgattgctataagaaggaggaatgaggactggggggcggcgatgcagcaaactgaccagctgccacctctccattctcccagtcaatctctctgatcattgtctctgcgctagctcacagtctggaagcttggagagcctcttttgtttctccacttttttttttttctcagagttctctgtaaaagcatgttttgggttgtgctctcctgtttcaattaatttatatctaccctctgacttttaggaacttattatattatttgacaaagcacaaatgtgcagaaaaatcctaggcctaataaacccagatgttctggatgcagattcatgcttctctctcatgaaactccgcctcccaggccatcagggtgaaagcagggtggcagctgctgtgaggacagcgctgccatgcagcgctagagaccattccccacaccgcacctgctgccacggcaacaagcacccctcctgccctccccctttagaggatgtcatgtggaagttccataaaggcaaagaccacggagagctcatcagtggattttacccagtaacattttaaaatgtatttattccttcttcgtttggattttctgaaaacggagcacacatttcgataggcatcaagcagcctgttgatttcatgtgtactaactagcaattttcttcttatcagagatgcttattgaaacacgaggctttcatttcttaatacaatgacacctttttaatcagtcccgcacagctcttaattcaggagccagaatgtcagtgaataaagttctccttagaaagcagacctgacaattcctatggttcgtgaggcttcaccttcacccaggcagccatattgacaaaagccccaagtgtgttgcaaagtgggtgggtgccggtgttttgcctgcttcgcgttggaacacccgtcctctgtctggcattgctctgcagtaggaattttggtgggaaggaagaagttgcagaatctgagtcagcagagtctctatttctagatgtgcttgtagctactctatggacacctgacctagcttcttctaagtcagtgctcctcaactgagcacaagtttgaccccagaagtcatatggcaatgtcagcagacagtttcaaccataacgactgggagggagctgctggcatttagtgtgcaaggaccaggggtgctgcttacgcatactatgatgcatagaatgttcccacgaaaaacaattgtctgactccaaatgtctacagcgccaagcttgagaaaccctagtctcagttacagtacctgggagccagtggatctccagtgtcctgctcgggtcctagaaggagctgggagggggtagattgtggcctctggtgttctgtgatggcagcagcaacatttactcaagactcattctgggccgggcgcggtggctcacgcctgtaatcccagcacttcgggaggccgaggcgggtggatcacgaggtcaggagatcgagaccatcctggctaacatggtgaaaccccgtctctactaaaaatacaaaaaaattagccgagcgtggtggcgggcgcctgtagtcccagctactcaggaggctgaggcaggagaatggcgtgaacctgggagggggagcttgcagtgagccgagattgcaccactgcactccagcctgggcaactgagcaagactccgtcttaaaaaaaaaaaaaaaaaaaaaagactggttctgtgcctggcctttgttctgggtgttggcttctgcctggctgtcttagagtctatttctggtgtctcataaccattctttttttttttttttttgagacggagtcttgctctgtcgcccaggctggagtgcagtggcgggatctcggctcactgcaagctccgcctcccgggttcacgccactctcctgcctcagcctcccaagtagctgggactacaggcgcccgccactacgcccggctaattttttgtatttttagtagagtcggtgtttcaccgttttagccgggattgtctcgatctcctgacctcgtgatccgctcgcctcggcctcccaaagtgctgggattacaggcgtgagccaccgcgcccggccaataaccattcttaagttccgtgactcactagaagggctcacagggctcagggagactcaggactatggttcattacagtgaaaaaacacgcagtggcatcagcaaggaaaacaaatgcaccaggcagtgtctagaggagacccagcagtggcctccaaagtcttcctgtggatttgcgcaagacacactcactcctccagcaatgaacttcagtgatgtaagccaagtgtctaagcccagggagggcagcttgggtctcagaggctagagcttttatcaggagctggtcacacaggcacctatttccaggaggaaacgtgaccaccgtaaatcatgctattgacttggtacgaaccaactagataagcttgggcagcatgtgtcaggaccccgggtgtacaaaacaaccttattaattagcagcgcagggaatattgcagggccaagttttcaggagctggccaagggtcagttaggccttcctgaagagatgtgagactctggcactgtcaggcagctagctctttcctgcacactgcagttgtcaaaaacttcccagtcattctgtgctttcttcagtaacctttcagtgaagccctttctgctaaagtcagacaagttcagttatttctgcttccaaccaagaacaggagctgactcatacacaaggtaattcaaaaataataaccgaggcctcttgtgttgtttgcatggatcttgtatgcatgtgtgtgtgtgtgtgtttgatttgatttcaaaacgttatcatttctatcagaaagggagctttcttgaagacttcatgacagccacacatgagtccttgggctggtgttctagggaagcacattatctgcccgtggcctttaatgatatgcatttaaaatattttttctttttttaatagagccgaagacccaggacacaggcaaagactgcccatatcacatttttgacgtttgttgatatagagctctctgcccaggaaagactttagctccatctgtctgcatgttattacacatcccaggccacttaatacatccagcttagctgtggtctgaggtaccctgcttttcttaggtttgaaatgaatgcagctcatgcatgtaagatgtgtcataatctcttaggaagcaatatcaccactcaaaataatgaaagatctcggaaagaaagggtacgaatttgttggggaatatttagccatgttgtctgactttcttacccaccacgttttttgtttttcagagccattgaagataatgaagagatcactcttaaagtgctctttttttcttttcagattttaatagtaaagcagaactttaaaaaaaaataaagctgataaaaattattcatagattcatcatttagagaaaattgctgttaacattttggtatataatattcccatcaattttcttttcttttcttttttttttttttttttgagacagagtctctctctgtcgcccagactggagtgcaatggcatgatcttggctcactgcaacctccacctcctggttcaaggcattctcctgggtttacaggtgtgtgccaccatgcctggctaatttttgtatttttagtagagatggggtttcgccatgttggtcaggctggtctcaaacttctgaccttaggtgatctgcccgcctcggcctcccaaagtgttgggattacaggcgtgagccactacgcctggcccccatctacttttaaaacgtgtgtgtgtgtgcacatgcatacatatatacataatgtatataaaatatataataaaaacataaatatatatttatacatgtggcataagtgtgtgtatatagagatgcatgcacaggtagtcataatttatgcagcaatttatacataatgtatatcatgtaatcctgttgatgttcttctgaaacatgtgcctgtttcattgataccacatcgacctgcaatattcttctgcatcatggaagaatgtagaatggccgcatggtattccatctcatctcatacgatagtcagcacttccgttactggacatacaactgttaccatttatttgcagtcacatgtcaggctgtgattaacatgtttaatcaaatctatgtgcatatataattttacctccagactatatcttggtggtagaatttctgaaccaaagagtgagcacatttttcaaacaattgaaactcatggccagttatcctccataaaagttgttccaaatttcacacagtaggtcttttttcccatgaacttgccaatcttaatgatttctaatttttaaaaaatctcaacagtttggtgtttgtaagtagcttttcattataattaaaacaaccttgattgttaaggagtagccagaaaccctttaaacaaaaccttactggtattttttgtttgtttgttttaaatcaggatgtcagcctgtttaaatttaccaagtacatgaaaaggaaaacaaaacaaaaatttcttgactctaaaaaacccttagggtggtctacagcctgcatctctcttccatgacttccatgactgcatctgacttccatggcctcatgactgaggcctggggctgcactcagcaggacaggccaccttaggctgggcccccgggggcagtgccaggattgggactggggtgggactggttgacaggagtcttctcaaattatctgtgcatctcacaggggaatatatgggtgtgcttttttcctttgataggatggattaggaggactcagagtttttcttttgtgcaaggataacgatttgctccccaaattttgattgtctcatactcattccttttctaattatcccatatttgttaaatacaagataatagattctgacaagcaatcagcaaatgggcaccaagtgatgtgcttcattttaattggattgccttttttttttttccttctctgctaaattatagcccatcagcatgagattccctgtggtgagcagctaataatatgcccaggtgcagccaattttacttcctaaagaagaactagtagctacagatccccctaaagtgaagtggaaaagtgggctgtaatagctcgtctcagcagtgcggcatgctagggcaacttttacatccggatctctattctaacaatttttttttaatgcagtggcaattaatttgcattatattgatgaattaatgaggcacaggacagaaggttttcttagagacttctgagaaatctcttgtttaattttgccttagatgttacaatttttaaaaaatcttttttttaagaattaggaatataaaaccactatagataaacacaaatgaaaatatcactgttaaatgaaccagtgaaacagcattccatatgtattttccaaagtggtgctgggatgtggctttgctttggtgcacaaaccatagacaaatgtacccaatggaatgtcagttaggtttttgggaacacttttccctatttgccattaataatgtttgttcctatttaaaacattttagtgacttttaattagctacaatgaggtgagagtatatgttttaatctttatctaacttaattttatttttaagccacttgaccatgatgtgcagttttcagataaacccaaatattctttctgaggctgaatcaatagagattttcgtcatcacatactacacaccatctgtcacagccatctatctgttactctcttggtcaagtggccaccaatactcttgagccaacttgaaaacatatgggaaagacagtaaagggacaaggattaaagattcctgtcttaattcttgaacctggaaagaaaaaatgaaggaggagaaaacagaaatggagaaaacaacaatctcccctccctaccaagacagggagggttttcagggtgacctctcagtgtgtcttcactcagccactgccttccatattcctgccacattctggttcagttactattgtccacacatgtccttcttcccttgcagtttgtccatctccacacttcagccagagggattatcaaaaccctttgataacatataacagacatcctcatgctgtataacaaacatccccttaaaactgccattggctatgtttgtaaacatgagatttggacaggactcagtggagcaactcccgtctgctccaggatgcctaggacctctgctgggtagacaccaatggccagtagacagaaatctctttctcctcgcggcaaatctgacttgggatttgtagaggtcattgtcattcatgagctgatatttgcttctcttcagctcattgccaagtgtcccatccacatgctatctctagcatggtgctttctgggtagtcacacttcagggcttcaagagaatgttctcccaaagactggggtggactgcaaggcttctaaggacccgaacttggagatctcaggacctcacatccaccagattctcttggtcaagcaagtcagtaggaccagtcagaattcaaagagagaggggaattaaattataaatctcaatgagcagagcagcaaagaacttgaagacatatttaatttctataaaatcgtgttggatcatgtcaccctctaagcgtacaaccttccaaggcttcccattgcttttcagatagaatccagcactcaccccaaacagcctgtatgttcctgctgaccagactcatctcacaatgtgctctctgagtcctgctctgtgtatttcaaatccactgatcctttatttctctaactatggtggttgtcccacctcatgttcctctctttgcacactgtttagctaaagccaagctatcttccaagtctctgtttaaatgtcacttagtaggggcaacctccactgacccatgggtgcagtcaagcttccctgtcttagcatccagaattatcaaataattagttgtgtgatttagtatatgcttcactgaagtcccatgagggcaagggcatagtgtgtggttcagagctatttgcatagcacctagaaaactgtcctgcacacagttggcacttactaaatatttactaatgagtcaacattacattagccaaccttaggaaagagtgcttacctgtgcatctcaaatgacaccaactttgtgaaataatagtctcctgagacatgctggatctgcaccatccagtagggtagccctggccacacacagtgttgggcagtcaaagtatggctggtctgaattgagggtgccataaaatacataccctttttcaaagacatggtgtcacatcaaagggtatcaattgtctcattgatatttcatatgaattacatgtggaaatgataatagttttgatacgctgtgttacctaacagtattattaaaattgaaaactaggccgggcacagtggctcgcacctgtaatcccaacactttgtgaggccaaggcaggcaaatcatgaagtcaagagattgagcccatcctggccagcatggtaaaacccagtctctactaaaattacaaaaattagctgtgggtggaggcgtgcacctgtagtcccagctacccgggaggctgaggcaggagaatcgcttgaacccgggaggcagaggttgcagtgagccgagatcgcgccactgtactccagcctggacgacacggtgagtctccatcccaaaaaaaaaaaaaaaaaaattgaaaactaatttcacctgtttctttttacatttttatatgactttttgaaaatctgaaaccacatatgcagttcacatttatgtctcatgttatattttgtgggacaaagctgctctgaagagaaggttctagggtgaaatgtacttggagaaattctgcaagcactctcactctttagagggtttgcaatgaacatatcaaaagccctgagaagtcctgcagcaaaactgctgttaactctaagccagtgcatttcaaagctgactggaccttgcataggtctcatctttttaagaccttggatattcacctcccatgaaacacacttagggaaacatgattaggtgacggccaccctgatgcctggccctgaggtcgtggacatggttcatgtaaaactgaatcttattatgcagattagaggcagagcctatggaagtgcatttttattgggggaggggaggggatggaatcagacacaggagaagtgccaaattcaagcactttggcagaatcacacagccccacacataaagtcgtataagcacatatgttcccaccggaagctggaagccgcttctactctgatggaggggatggggccttgccagccccagggtcatgggcagcccgtgctgggctctttacagacatctagggctgttccttggtttgccttatttctctagtttgctcagtttgctgaaggggcaaaccaaaggtaggacacaagttcaggtccacaacggctgggtgcagtgtccgagatggaggggagaaatgtacaccgagtggccgtcagggcagcagatggtctgcaatttcctcccagaaatgtgggcatttttttctttctacagtaaagagtggatattgtctcgctgggctttctgaatttcatttttgatgagagatttaaatatgctgtttctcagcccagaatcctcgagatgttcgtgtggactatgtcccaagccccgtgcttgttttaaaggtgtttggttgtcaagaaaggtatcctgtgaacctaagaaatagtccgtctccctatgaggcaggattgtggcctcttttaaattaatcccacgtgaactgtgacctctttgttggactgtcaccagaatcatcttgatataagagcactgagtaataagaatctaaccagagcttgaggcagccgtgatagtctcaccaccatctgcccatcctggagctagactttcccaggcaaggcctgcctgtcctctgtcaaagcaaatgctggcctcccattagctcctaattctaataagggtttctattttatccacttacctctcctccagttgatatttcccaacatcttttttaccatcttccccaacaattcagtcctaacaatgctctccccttcctgagtcatctttccttttctcacagaagttcatcccttccacactgcaggattagaaagatcactaccttgtgttattctcacagagcagagatgccaagcatttccccacaagcataaatcttaattgccgtccttgctacaaatcataaataaccctagcccaggtatcattgcacagaaagccaggcaaaggagacagaaagccaggcaaaacataatgaaaaggtattaattgataactaaacaggtgttctatcttgctccagtacaaattttatggcaacaattttgttgaattgcttcttctggcattgaaaatttcatatgatgtgcatagtttcactctttctaaacccatctggggaaacaacaacggcaaaatcgtgatttaaaaatctgaagcaggctgggcgcggtggctcatgcctgtagtaccagcactttgtgaggccaaggcaggtagatgacttgagtccaggagttccagtccagcctgggcaacatggcaaaatcccatcttttctaaaaatacaaaaaatagctggtcatggtgtcacatacctgcagtccaagctatgcaggggcctgaggatggaggactgcttgagcccaggagctcgaggctgcagtgagccatgattgtgccactgcactccagcctgggtgacagagtgagaccctgtcccaaaattaattaattaattaataacaatctgaagcaattcaacttattcaaaacactttacccagaaagaacttgcaaattacccagggtgaaaacgagtggtagctcctggaattaataaccttaaatttaaagaagagaagaggtccctggtacacttcaaaccaaaattgttgtatcctttaagagtattgcaaagttaactttctaaatatgtgaatttatttaaatttcccaacaattaaaatgaatcaatgtttcccaaattgtgttccattaaatacttctcagggagagtttgaaagttctgcatttgaatatgggctttgatggtcaatagacttgaaaaatacctcatagtagagatctactaagaatacaacgcatacaagcacactaaaagtgctgagatattctgttgtcaacacacctgtttcacttcagctaaccttttccagagcttatctgggcacaaaacagtttattttgagctgtatctcttatttttccttagaacaccgtttaggaaatgagaaaatatacaatgttacctggtatacaatggcacggtttcttttttgttactctgctcaacacacctaaccatttctccctaattttaattttgcatataatcacaggatattttgctgttctttgcagtttcaaatatattttcaaaatattaatttttatccctaatgccagaaaaatacactgctatggcatttcaaaattgtagccatgaaatagaatgagatgtgatgtcatcacgtttttaggataatttctcactgccactagaaaaatacttcagcagaattcatgaggattatgtatattttataatcagtctcctcctaccatttatggtgctctttagaggtgataattctgtcttttgaagatctctggatcacaggaacaagagtgatggcaacaccaagagcaagccagggccctcctgaaactccccccttcctcactcactcttcactgcagcctctgagaagggaccttggccctgtaccaacttccttctccatccaaagtggcacctatggaatggcgcctctcaatgtgggaatattctaaccaattgctttgtattagttcattaccttgctgctgataaagacatacccgagacagggtaatttataaagaaaaagaggtttaatggactcacagttccacgtggctggggaggcctcacactcatggcagaaggtgaaaggcacgtcttacatggcagcaggcaagagagaatgagagccaagtgaatggggaaaccccttataaaaacatcagatctcatgagacttattcagtagcatgagaacagtgtgagggaaacccccacccgcccatgtttccattacctcccaccgggcccctcccatgacacgtgggaattatggcagtacaattcacgatgagatttgggtggggacacagccaaaccatatcatgcttcttttcatttttcccctaaagaaagaatatcgctttctaaaaagatgaaatccctgaaaagatggaatttatttcctaaaaaaaaaaaaaaaaaaaatcagaattaaagggagaatgaggcatatgaaatttggatccaaataacttgaagcacatttcttatatatgatgttctttgtagaattcctttgactgattggaaccatttatcttgctgtgatttcacagcacaggcataattgtgattgttttattagttctttttgctgattaactgaaacataattgtgctttttgaaaaaagagtgtgaagttagttgatttctgaaaaggtatgtaagaatgtaaacacgaggattcttaatatcagtggaagaaaatgactcagtggtgggactgtgttttcacactgctaataaagacatacccaagactgggtaatttatacaggaaaaaggtttaatggactcagagttccacgtggctggcaaggcctcacaaacatggtggaaggcaaggaggaccaagtcatgttttacaaggatggcagcaggcaaagacagagcttgttcagggaaactcgccctttataaaaccataagatcttgtgagacttattcattgtcacaagaacagcacaggaaagacctgcccccatgattcaattacctcccagcaggtctctcccaaaatatgtgggaattcaagataagttttgggtgatgacacagccaaaccatatcagactgaaaacagagcagagagatgttcattccatggaagctaaaaggtacatttgctctgagctgtgagctcgcatacagaagtgggctgctcagctactacagcccaggtcacactctgctgtctcctggctgtgtgaccttgggcaccttctttaactcccatgcacccgtttggtaaaacttggggctggcctgggttggaggccaaattcaaccacaagccagccaatgttagccagctagaggatttgtacttgacaaatatttgtgtttgactgttgacctgggcaatgtttaaaaatttattttgaatagttgccaacactaaacattttaaaggtaacataaaatctggatttccagctcctctggaagaattataaatctggcaatgcaggctctcattcccacctggcagctccagcagtggctttggtgctcttcactccagctcatcaatgtccccatcaccccctcgtggccccaacaccaacactgagacagagtaccagctgccaattgtgtggctgtctctttattataattcagaagcattaaatgatttatgatattcatattcctatctaaagtagagtatttgtttaaagaaaaatgaaatataacatttttatggaaataagaatgtgcattggctgggcacagtggctcacatctgtaatcccagcactttgggaggccagggtgggtggttcgcctgagttcaggagtttgactccagcctggccagcatggtgaaaccctgtctctactaaaaatacaaaaattagctgggcgtggtggcacatgcctgtaatcccagctactcgggaggctgaggcagaagaatagcttgaacctgggaggtggaggttgcagtgagctgagactgcaccactgcattccagcctgggcaatacagtgagactgtcttaaaaaaaaaaaaaaaaaaaaaaaaaaaaagaatgtgcattaagcacatatataagtgaagaacatattttttgtttaaaacccattcacctttgctcatgtttactaatgtcttggcccctgatggcctttcattctgtagcctgtatagagcagggatcagcaaaatggggctcacaggccaaatgtggcccaacccctttttttgtaaatgaagctgtattgggacgcagccatgttcacttattcgcattttgtttatggctactttcatattacaataggacacttcaggagctgcaatagagactctgtatctctcaaagccaaaaatatttatcatttggcccttcgtaagaaaaagtttgctgactttgattttcagcgagggcacccagagagcttggaagtgattactcctgggctcataacatgaaaaaaagctgaacagaatgaaaatctatgacttttctggattcatcagaggattgaggtcacagggcaaaccactggtctgcaatctggagagacaggtcaacacagagaatgagagccaaggtcagcttacagggggcagaagcttgcggagccagtgattggtaggaacacgtaaatggtaagttcaatgaattgctggagactaagtatgtgaggcttgagagttaatatttcctaggagcccctacagctttcttgagtttttcctccaggaagctcaccagattctcacatgaaggtcagagaaaaatcccctccagttctgagcatgggaagtgagaaggtaagtatttgaagcaagcccattgcattctctataagaaaaccatgtccttcaaggaaggctaccttaccagaacattgtccaacttgaggaaaggaaaattagccactggtgcccccttctatcctgcctgcctcacataggaggaggaagaaaagctaaaaaacaaacaaacaaataaacacaaccacaaagcacatctgaaagtcacaatccagggacttgggtatactgcaagctgagattttatcttaagagtatggagagcttcctctccctaacacctcagcatcacatcaacaaggctccaaaataataccagtgaattacagctaagagagctgcaagatgcagcctctattcaagaatgagttcctagggaaacacaaagacaacaagagagaaaagtgagataaagaaactaaaggctgtgtcacctgcagctacatcaaacattaaatacagcccagattcatgtaaaacctcatgctaaaagtctaattatattagctttcattacccaaatactgtgtctgactctcaacaaataatgacaagaaatgaaaggcaagaaaaaatacatatgaagagacagaataagcatcagaaccagactcatatatggcagtgattttggaattattggatatggaatttaactatgattaacagaattagggttctaataggaaaagtagatgacaagcaagaacagatggataatgtcagcacagaaatggaaactctaaggaagaatttaaaggaggtgctagaactcaaaagcaatgtagcagaaataaaaagtgcctttgatgagctcattaatagactagatataaacaagaaagaatcaatgagcttgaagatacgtcaggagaaactttttaaaccaaaatgcaaagagaaaaaaaatgaatggaaaaatagaaacagactgttcaagtactctgggacaattacaaaaggtataacacatgcagaatgagaatcccagaaaaaggagaaaagggagcagaagatatatttgaaataacaatagctgacagctttccaaaattaatgatagacactaaaccacatatccaagaggctcagaaaaaaaaaaaaaaaaaaaagaaatgcaaaaaagtctacacctaggcatgtcatatccaaactgcagaaatctaaagaaaaagagacaatattgaaacaagccagagaaaaacaccttacctgtagagagacaaagctaagaattatactggactttttgccacaagctacacaagtaagagagtggagtgaaatgtacagtattgaacaacaacaacagtaacaacagcaacaaaaaacccaccaagatagaattctctgtctacataatgtttcttcaaaagtgaaggagaaataaagatttttgtcagacacaaaaaaattgagggaatttgttaccagtaaacctgcctttaacatttaagaaaggttaaaagaatgtattcagaaagaagaaaatagcatgggtcagaaattcagatttacataacaaaaggaggagtttcgtaggaataaatgacagtaaaataaaatgcataagcagaattagaaaaacttgctgttatagttaggggcttcagcacccctctgtcagtagttaacagagccagcagacagaaaatcagtaaggttatagttgacctatgtaacaatgccatcaaacaactgaatctaatttacattcatagaatacttcatgaacaacagcagaatgcacattctttacaaattcacatggtctattcaccaagactatattctggactataaaagacatctcaagaaaattaaaatcatagacatcatataaaatatggtcttgattataatgaaattaaacttcaatggaattaaatttaataacataaagacagctgcaaatctctaaatatttggagaataaaaatacacttccaaataacacataagtcaaagcagaaatctcaagggaaatttaaattatttgtaactaaatgaaaatataacctatcaaaatgtgggatgcaatgaaatcactgcttcacagaaaacttataacattgaatgcatagattagaaaagaaaaaagatttgaaatcaatagtcgaagcttccaccttagaaaactggagtaagaagtgcaatatcagcctaaaacaagcagaagaaagaaaataataaaacttagaccagaaatcagctacattgagaccaggaaaccagtagagaaaatcagcaaaactaaaatctggttctttaaaaatgtcaataaaattggtaaacctctaacctggctatcaagcaaaaagaagacatgaattattaatattggaaataaaagagaactcatcaggaatgctttcatagatgttaaaaggataataattaaagggataatagggttatgaaaagccctgtagccataaatttgaatacttggatgaaataaactaatttcttgaaggacacagactatcaagatttgtataaggagaaacagatattctgaatgggcctatatcaatgaaagaaattgactcaataattaataaccttccaaaaaagatagcatcaggcaccagtgtttgcactagtgaaatctaccaactcttaaagaaaaaaaatgataccaattctttgcaatctcttcctaaaaataaaagctgagctgacgttatgtctcatgactatgatctcagcactttgagaagccgcagcgggcggattgcttgagctcaggatttccagaccagcctgggcaacatgacaaaccctgtctctacaaaaaatacaaataattatctgagcatggaggcacatggctatagtcccagctacttgggaggctgaggtgggagaattacttcagcctgggagacagaggttgtagtgagcagagatctagccactgcactccagactaagtgacagagtgagacccaatctcaaaaaaaaaaaaaaaaaaaaaaaaagtagaagcagagggaacatttgctaactcatttgatgaggccagtattatcctaaaaccaaaacagataaagacatcacaagaaaactacagatcaatagctctaatgaatttagatacaaaattactcaataaaatactagcagattaaatccaacaatgtataaaaagaataatgtaccatgatgcatttggatttattccaggtattgaaggatgctttaacattagaaaatgaggaaatgtaacctatcgcattataataggctgaagaatgaaaatcatatgatcataacaacagatgcaaaaaagaatttggtaaaaccggcacttatttatgataaaaatgtctcagcaaactaggaatagaggggaacttcctcatcttggaaaaaagaatctacataaaacctataacagacatcatacttaataatgagaaaataagtttcttccctctaagattggaacaagtaaaagattttccttttcatcactccttttcaacattgtgctggaagtctgagctaatccaggaaggcaagaaaaggaaataaaatatatacagattgagaagaaataaataaaattgtccttgttcacagatgacatggtagtctatttgaaaatctgaaacagttaacaaaaaaatttctggaattaataagtagtcatagagggttgcaggatacaagactaatatatgaaagtcaattgctttccaatgtaccagcaataaacaattggaatttgaaatgaaaaaccaatataatttctattagcaccaaaaaacccacttaaatattaatctaactacatctggacagtatttacatgaagaaaactacaaaactctaatgaaatagacaagatatatagaaatggagagagattctattgtcatggacaggactcaattttgttacgatgtcagtttttctcaacttgatttatagattcagagtcatcccaatcaaaatctcagcaagccaatttttacacattgaaaaactgattctaaagcttacatggaaagctaaaagacctagaataggcaaggagatactgtagaagaaccatgagagaactgacattacctgacttcaagacttttggtaatcactagcttctggtgttggtggaagaacaggcaagtaggtcaatggaacagaatgagggctcagaaacagatgcacacaaatatattcaactgaatattgacaaaggaacaaagacaattcaatggggaaaggatagtcttttcaacaaataatgctggaacacctgaaaatccatgtgtgaaagaaactagacacaaaatttagcaaatattttacaatacgtgctttaacaacaacaacaaaaaaactcaaaattgattagagacccacatataaagtgcaaaacaatacaactactaaaagataatataggaggaagtctaggtaaccttgggtttggttttgactttttagatacaaccgcaaaagtatgacgaatgaaaggacaaattaataagttggtgctatggtctggatgtatgtgtctccccaaaattcatatgttgtgatagtcttaggaggtggggcctttgagaggtgattaaatcatgaggtctctgccctcgtgaatgagattagtgcccatataataaagaccccagagagctgccttgtctcttccaccatgtgaggacgtagcaagaatcaccatctatgaaccagaaagcagctccacacaagacagcaaatctgctggtgccctgatcttggactatccagtctccagcactgtgagaaatgtcagttgttcataaattacccagttgatggtattttcttatagcaacccaagctagctaagatagtttgacttccttcaatttaaaaacttctgctctttttattgttgtatctctgccaggttttggtatcaggagatgatggcctcataaaatgagttagggaggagtccctccttttcaattatttgaaatagtttcagaaggatggtaccagctcctctttgtaactctgtagaattcagctgtgaatccatctgattctgggctttttttggttggtaggctattaatgactgcctcaatttcagaacttgttattggtctatccagagatttgacttcttcctggtttcatcttgggagggtgtatgtgtccaggaatttatccatttcttctagattttctagtttatttgcatagaggtgtttatagtattctctgatggtagtttgtatttctgtggggtcagtggtgatatcccctttatcgtgttttattgtgtctattcttctctcttttcttctttactagtctatctagcaatctatctattttgttaacattttcaaaaaaccagctcctggattcattgatttttttgaaggattttttgtgtctctatctccttcagttctactctgatcttagttatttattgttttctgctagcttttggatttgtttgctcttgcttctctagctcttttaattgtgatgttagggtgtcgatttgagatctttctggctttctgatgtgggcatttagtgctataaatttccctcttaacactgctttagctgtgtcccagaacaatgataacacatggacacagggaggagaacaacacatactgaggccagccagggggttgggggccaagggagggagagcattaggataaatagctaatgcatgtggggcttaaaacctagatgacaggttgataggtacagcaaaccaccatggtacatgtacacctatgtaacaaacctgcatgttctgcacttgtatcccagaacttaaagtaaaataataataataaaaaaaagccttctgctcagcaaaagacacaattgaacaattgagaacgttaaaagacaagccaaagatggagagaaaatctttgtgaaacacatattggaaaaagacttgtatccaaatatataaagcagccttaaagctcaacaatgtgaaaacaaatgatccaatgttaaaaaagaacaaaagatctggaagatcacctcacctaagaagacacagaagtggaagataaagatatgaaaagatgatcagcattatatgtcgttaaataattttaaattaaaacaataacgagatactactctatagctactaaactggctaaaattcaaaaaacttacaatatcaaatgctgatgagatgtggagtaacagagacggcagagtcactttaaaagacagtttgggccagtcgcggtggctcacgcctgtaatcccagcactttgggaggccgaggtgggcagatcacaaggtcaagagatcaagtccatcctggccaacatgatgacaacctgtctctactaaaaatacaaaaattagccgggtgtcatggcgtgcacctgtaatcccagctacttgggaggctgaggcaggagaatcacttgaacccaggaggcggaggtttcagtgagccaagatcgtgccactgcactgtagcctgggtgacagagtgagactccatctcaaaaaaaaaaaaaaaaaaaaaaaaacagtttggcagtttcttacaaactaaacatagtcttaccataggatccagcaatcacgcttcttggcattcatgcaaataatttgaaaacttatttccccgtaaaaatctgcacatgaatgtttactaaaggcaaccgaactaaaatcaaccgaagtgttcttcagcaactgagtgagtgaactgtggacttttactcagtgatgagaagaatgatccatcaagctacaaaaagatcaggaagcaccttaaatgcatacagccacacaaggaaagcaagtctgaaaaagccacatcgtatgtggatccaaccatatgacattctggaaaaggcaaatgctgagacaataaaaatgtcagtgactgccagggatgtgaaggtggcaggtggggaaagatgaacaggacaaaccccagggatttgtgaggcagtaaaactattctgcatggcactagcatggtgaatacatgacattatacatttgtcagaaggcacagaacgtacaacacacagagtacagcttaatgtaaatcgcggcctttagttaacagcaaattcctcacactgttgcaagatgttcataatataggaagttgagtataggggagtggcaggggacagtgcatgggagctctctctactatcgcctcaatttttctatacatctgtaactgttctaagaaataggccgggcactgtggctcacgcctgtaatcccagcactttgggagactgaggcggatggatcacctgaggtcaggagtttgagaccagcctgcctggtcatcatggcaaaaccctgtctctattaaaaacacaaaaaattagctgggcgtggtggtgggcacctgtagtcccagctacttgggaggctgagggggaagaatagctagaacccaggaggtggaggctgcagtgagccgagatcatgtcactgcattccaggctgggaggcagagtaaaactctgtctccaaaaaaaaaaaaaaaaaaaaaaagcctattactgtaaaaaagataggttaaaaaaaaaaaaaaaaccggcttgcaaactttgatttagaaccatgaacctttttatcctaaaactctgtgaaatacttagtaccccatttctgtcattaaaccaacaaaggagacatttcgtttgaagaagatattttcccaagaaataaaacataaatatgaaatacacaaggtcatgtaggaaaagtagattatttttctttaccctgtgaatattgctctcagggtgtagcagtgccctccagtcaggcaaaaattagttgaagctagtaatagccaacctggcttagaaataacggctaaatatatgcattatgttgtgagtgcttactatttattgagagtgtgttttattagatttgggtttctgaaaatgtgataaattaattgggttggtaaaattaactagcaaaaatatttgtaaacagctataatcttaattacaaatgagtttataaactttcattttttcattttaagggaaaagacaagtgtagaagatgatgctgtttattttatttttaatataacatcatgctgccttacctattatcttttgatgaattctggaatactgaggaacatgagcatatatatatatatgaaatatttgtaaaatgaggaaactgggagctattttatttttccccaagagtgattttcagctataaaactgtaatgtggtcaggtcgtagatcacataaaaatcattctatgtttcccttaaaattatctaaatagagttcactagtttttcttaatgtgcacatttcgtatcacccagtatggtcaggggtgcaggaggtaggtcatcttcaagacattttcttgttgcaagaaattaccacaattctgtgttctgttgttcttgtttttaagatatttacctgccaagcatacggcataattatactttccaacctctccaattaagaaagaacttttggttctttgtgctgtggaactctgagtagataagatgttttttcttttagctaactgaataatacccacaaaattcaataagctctttgacaaaaatggccattgagggcctctgagtcaccttacgctcatcaactcccacccgtcaatgaatatcagaatatgggctctaatatgctttaaaattagtccttccttaaaaaggtgtcatgtaggggaagcactcttatatttgaaagcaagtatcagaaagctggagagtggtaccgatcctgcagatataaaaatatctttagtgtttttctaaaacatctacttttctaggtagtacctgtctattattaggggacaagtgagtcagccgtgttgatgtgacgatattagggtccttcttgctacaagctcatgtgccattttaaggcttacccccagagcatgggctcagcaaaccactgcagagaaaacaggctggtcctagtgctctgccttgtgctagttcttgcgcaaaggaaaaccacaggccagcagggcctaagaatcagtccagacacgcacatgcactcacacagagcacagaggccacagtttgccgcctgtggatcccattaccaacagggatgactttaggtaccaggatacttcgtctcattcaggtcaaaacttttactttgcctaaagcatttctcattcgcgatgtttggatccaaagactgtagtaatgctacaacttgcttgcttctttgctattttcctttcttttaaaaatggattctcatcagaacatccctttcaatgtaataaactatatttggatctgatcctcttataaattggaaccagagtatgtggttaggttgtgcctcatcttttctgttgataagtgttttatgtgaggaggttcagaagagctgactttcagctacaaaggttgtgttcccgttcctgaggcaaacagcaccctggccttcagggcagagcttggctgggcctttaagcactgggagtcttttgcacaccttcgaatagagatggctcttggaaacccagtatgtgcctttccctagcaatttctcttttcttttcttttttctcttctctcccttcccttctcttttccttccttccttcctcttttcttttctttttttttgagacaggatctcactttgtcacccaggctggagtgcagtggtgtgatcagggctcactgcagccttgatctcctgggcgcaagtgatcctcccacctcagcctcctgagtagctgggactgcaggtgtgcaccaccatgcctggctaatttttgtattttttggagagacggggtttcaccatgttgcctaggctagtctcaaactcctgggctcaagcaattcacctacctcagcctcccaaactcatggaattataggcatggatatggaaagaaatgcatagcagatggtaaaataagaaggaaacacaattgcacttggtggcaccaaagaaggcctgccctgtgctgcctgggctagggggacttcagaaggtgtcctatttgaaggtgcacccagtaagtgttggttgctcacctcacccaatacctacctgtccttccatcagggagcacatagaattgggctcaagagcatgaaacattctcaagcgatatctctttagcatatggggttccctctacaaagactgaggttactgtcttggcatcagcctcccctcccctgagtaacaccaaaaacacaatcatttgttccatttgctggacccagttgagagcccacatctgttactgtagacagtcaagtttttatctacatacaagttattgattatctacaagttattgattatgattatggcatgcgaccctctgttcacacctaactgtgctccagcatcctctttaggccatcatcccaacattatctctatggctactctttattaccccctaccctgtgccaaatattgtgctaactaatggcctgacagctgttattttattgaatactcacagcagtcttgagacagtcgttagtgtttttatttttcagatgataagagtgagattcaaagaatacaagtatcttgcccaaggtcatattcctgaaacgacaggccaggattactgcccaagtgagtcctctttaaacccaggttcctgtccgctattgtgataagctatgtcacactgtaaaattagtctgctggttaccttccagggactcatggctttgcagaatctccacccaccagccacacatgtccagactctattgcacagtgtattattgttccaaatctaggattgattaatattttcctgttttacctttaagaggatgacccttttttgactttatcccaataagttttgaggtaggggcatcttcctacaggccttatggatgaaaataattctccacaattttaagtatgatagccacctgagattaactgaaaaggggcttgtaagaaagcagaattttgtttcaaatatagggggataaatgaatggacctaagtaactttctgaaaaagcataaacgaaaacaacaacaacaaaatatgctatttaacctgtgttcataggagtcgattaaaaccttctattttggaacatgagatttagcggaaaacatctgtagataggtagcaaatgttagcagctatttaagatgtaagtctgacttactgatgaacatcagaaatggatcactcggtcgcttggaaattcaacctccatttcctgtgtgtaaagtaagctgaactggctcagactgagcattctagctctgaatagtaaaataacagtgaggaactcatgaccatgatacatgatgctttcagataattttaaatagttttataatattgaaacatcatagcctggtatagtggctcatgcctgtagtcccagcactttgggaggccaaggtgggtggatcacttgaggtcaggagctcaagaccagcttggccaactggtttcaccagtaaagatggtgaaaccccatctctactaaaaatacaaagaaaactaaccagttgtggtggagcatgcctgtagacccagctactcgagaggctgaggtgggagaatctcttggacccaggaggcagaggttgcagtgagctgagatcatgccactgcctgccagcctgtgcgacagagcaagactccatctcaaaaacagaggaaaaaaaaaaaagagaaacatcatgaaaaggtgaaggattggaatgctgatagttgaggctacaaaaccatgacataagtctaggagtttggcctttattccaaggaccaacaatttcaagaattattaatagcacagacttaataaaaaaaaattaaaaaatccttttttgtgaagttccaatatataaaacatatgctttaactcttaaatagtgtagtttaagttaacaggtttctaaggcagtaccacacttcagtttagggcagaaaatacttttagtactaattttgaactctaatccagaaactattttggctcttcaaacatttaacttcgtcaaatgtattttgttttgcatcttttaaaacctcgtttccatttaatcactggtacaatatctgcaattcattagctcaacaaatatgtgcgtgcttgtgagttcttctgaactcttaagggctggggacagcaataagttagaattcgatctgtgtcttcatggggcttatattctgtgagagggaaggacaataaacatataatccatggtgatacaagtgcggtgaagaaaataacccagagtgatgctgtagagatgacatggggtgagggtgatggatgagatggtcaggaagggttctccaaggtctcccttggcaagtgacatctaagtcaagacttgaatgtgaaggaagaagccagaaggaacagcatgggcaagcacacagaggcaagaaagagtttggtgtattggaagaacaggaagaaggggtgtttcggagtggacagttaaggaagtggtcagtgaagtgggagagacagggaggggtgaaaccactacaccttaaaaatgatagcgaggtctttacattttatttcaattggagcaggaagccattgtccaaaaccaaataataacttgaccttttgcttcctatttgagtctctttaacttattaaaaataagacatacaagctcatatgagtatgtgatatttgatagatattgagttaatatagtttatcagatatttcaagtatttgaagtatccttactgttaccttgccttaggataactacctaaactccttacagactaattgcattatcagagtaatttctcacctgaaaaatttaacattttatatatgcaaaagtcagattgaaaaagaaaacaaaattgtacttagctctaaaactttaatggggtattactgccttcctggatgttgtagaccaccttcttaaatgtgacacatttagcaattctgaatgccagcaggatgttgtagactaccttcttaaatgtgacacatttagcaattctgaatgccagaaggcagctgggccatgggggagagtcctggctaaggtcaaagtaagaccctgtccctttcttgctctttaattcttgggcagataatgtagtttctatgacacataattccttcatttgtaaaatgggtccaacaagctaatacatattattggtaagctattagaaatcgaatgcattttctccaaatagcctgggccatttgtattgccaacgtatacttggcatatggttaagggattgaagtgaaaaatattaaattagaattcagtttgtccctattataactatgaccacttcttgggaacaaccctagagtttatgtatatttataccttgttacctcactttgttctttccaaactcatttttaatagaattattccaagaaatttaaccctagtggacactttctattccacacaatataacataccctcacaagtacactccttttatctgtttcaaatgtctgtcatactgggatagaaaacaagttaacatacaattttcctctttacttatatcgaatggtaaggaggcttttaacaaatggctttatataacaactagtattgcgtgtttaggtaacaggtggatactcagtactttattggcaatggtgatgagggaattttgatcttggaattcccagcctcctgaactatgaggaaaaatatttatgttgtttataagtgtattattctgtttccagactgggtaattaataaaggaaaaagtcttaattgactcacagttcttcatggctagggaagccccaggaaacttacaatcatgatggaaggcaaaggggaagtaaggcaccttcttcacaaggtggcaggaaggagattgaatgcaggaagttctaccaaacacctaaaaaaaatgtgatctcgtgagaactccttcactatcacgagaacagcatggggcaactgcccccatgattccattatctccacctggtctctcccttgacacatggggattatggggataatggggattacaattcaagatgagattttgggtggggacacggccaaaccatatcaataagccatggcattttgttatagcagcctggacaaactaaggcagttggttagaatacatgtttttaaggcaaagatgaggaaagggaagaatcctggacctcaccatgataaccagatggtttagacagggcaatacccctctaagatgctgcttcacctgagaaatgaggaggataatattggtacaggactttcagaagtgagataatgttcaaaagttacaaaagggagacccaagtatagtctcttgttagtttcttagtatttttgactttgagatttattttttaaagtaatagtaagtgacattattattgctattactagctatatcatctattggctggttactgtcaccagcactatacaaaatcctttaaatatgttacctcatttactcctcacagtgacaccattaagtcagagctgtttccccacattttacatgaggaatctgaagtcagagagtttaatcaactttccccatgttcacactgggagcagagtggtggagatgggatttaattccagctgtaaatgcatggggcagaacccctgcaggggctccatggctcattaatgtgcccctctggcccaagcatgggttaagaaagtggacctaatgatagagcactaaataggggatattcgaatcttgcatttatcaaagtgccattgtccatatcatgttaatattttatatttacatacttccatgtaagtcgcagacctgggatatgaatctaggcctttgagcctaggcttggtcttccctgtgggtaaaaatcctgttgcactttgggtctatttcttagttacattggagattcatattcagtgtttggaatttcttacaaaatgacggaaactgcctactaattcccattgattgaagacacaatatctaccaattcagttctcaggaagaggagttattaggtttaaatttatttttacatcttaaaagaaactgctgagtgataggagaggagagtgttaacttggagtgacagattaaaaaaagtgagccagttcatttgtacataatttttggctatgttatccagacataagctaccagaggacaaagcagtgtaataaatctaatattctcaaatagtttgtgtgcagaagtttagcagtgaggatggttttgtaatgaccgcacatgctagattgcaaactccattcttcactattcatgtacatttgatgtcatatacattgccaaagatgatttcaaaaatgccaagcttctagtctcactttccttagttatgataccttatatcttaaaagggtggtaatttattagttggttttttgttttttgtgtgtttttttcttttctttttggagatggagtcttgctttgttgcccaggctggagtgcagtggtgtgatctcggctcactgcaacctccacctcctgggttcaagcaattctcctgcttcagcctcccaagtagctgggattacaggcacatgccaccacacccagctaatgtttgtatttttagtagggacggggtttcaccatattggccaggctggtctcaaattcctaacctcgtgatccacccacctcggcctcccaaagtgccgggattacaggcatgagccactgtgcccgaactaatttattagtttttattatttcattttgtttagatagaaagcatggagttaaacattaattgtactgtattggctgccaaagcatagaaattgtattttggaggtgagagctgcagggtgggttgctgtttcttcactgattattccccatgagaaaaaagtgacttgttgattgcaatttcgttgtgaataatagttattttcatggtctttggaaaacaagacagagaagtggagagggatatggtagcacggctgggattgtcacaggaaataacttgccccagtctactttttttcatacacatacagtttgagttcctaattaatcagttgaaaaatccagctcctgaaaatatggctacagaatactgatcattgattgtgattcattttgcttcacataaatggttgcattttcttttcaatgagaataaagtttttctttttcttcctctgtcaacataattccctttgttcttattcagttttcttgttaaatgtttttccacatgtagaattttacaaattgaataatacatgcagaaaaaaagaaaaacaacaacctgtctttttttctttcgtctaggtcatgggagaatgaaaaactagaatcttcatgagcattccatactaaatatttgtattagattatcattatttattactttgctaaacaaccatttttatccatcactttttatgaatctatagtaaaacaaaagtaaacagcctccatgctttcaacaaggagagtctgttgctctaaaaatgtccatttcaccacagtttttcctcatcaccacttgctgaaacttactgcatttgttcatgtttattataaagacttttgccatcctgctcggtatttaagattcatcacaagggtattccccctttagatgttctgactaatgttgatattaaccatgtgacattcacaaagtaattttttcctgaatatatgacagtatatattaggttggtgcaaaagtaattgtgatgtttgccattaccttttaatgccaaaatccatgattttgagccaacctaatatcagaggggtaggtaatgcaattgtaagtgagtgttctttggagtcaggtagatcctgcctcttctcagagcagctgaggggcccgccaaggtctgtggctgtaatcctgagtcatgtggatcaggaacgcctttaagtccatgcctggcagctgaaggcatctgcagtttagattctccttgtaccaattttgcaaatctctgcaatattggaagccatgcacccagctgaatggaagcaggtgaaaacaaggccgcatgaagtcatagcactgtgggcagcagtgcaccagtagtagctctttgtgctcaagaatcaaatgatgactgttggcagggattaaaactggggctgactgagtgctgggctttgatcttgccaaatccactgagacagctgaaatttcatgaaaaggtgacaaggatttcctaaaccaaatgcaaattgatgtttaactttcaactccagctcacacccaaaggctttgcaagtgcttgaaaaaagaatatctggcttgtacatcagaaaatgacctttacaatatattttatttgggctaaaacttgtgctgcagcatcactgaaaaaaattactcttactatttaaatgattatacttttcataaaatttcaatgacagagatgctaagtagagatgatgtttattgaaaggcattcttaaaatttgagaaggatttatcaaatgataaacaacattttgtgataaagactatgcattcccacttatttggtaatgcagccagttacggggtacacaccatttttttctttaactgatgtgataaaaaattgtataaaacttaataaacattttccaacatgaatggatgctgtaattaacctatactcactaaaatcagtgtgtggattagcattgtattgggaaaaatatgtgattatgtgagttataacccagattttgtcatgaaaattagatgcttaaagctaagacatgaccctagtgttctcatcagaaatacgggtagatacaaattagatgattttgaggtaattttcagttaaaagtctctgatacatatcctttttcatatcctctccaatggacccttgtttcattgatgagattattacacgtattaattcgctcccaaagccttttttgtatgtttgttgatcacaagattattttaagtataataattttactagatttaaaaattatttttgaaaaggttgtgtcctctaatgtactccttgaattactcatctgctcttctttatttttgtatctggaattagtgccttgttttcctttttagatgctgtgtgatgtggttactgccccaaatgttcatatttgctaccacttagagtccagccttcttctgttgtctaattatatgctattaagactgtcatattgtgttgttaggtacagaaatttgctttagaaacaaactgaggattgcgtaagtattgacatggcagggtagtgttccatgtgtttcttgggcaagttgggtttcaagcatggatctttgtccacacctctcgcaccttcttggaaatatatacagcaatgtcaccagaaatatcttgcaccttaaggctgtctgtcactgtcagcatcacttggaagctggtcaggaatgcaaaatctcaggctctacccagatctcctgaatcggaattgaactttaacaaatcctctagtgattattatgcaaatgaagtttgaggagcgctgggctgaaacatccttctccttcataacagctttgggtggggtgcttctgaacactctttcccaagatgcagtgttgtcattttccttaatcaactctgtctctgggacacagaacagtcaaacaagattttctgtgttagtctgcttttatgttgctgtaaaggattacgtgagactgggtaatttataaagaaataggttcatttggcttatggttctgcaggttgtacaagaagcatggtgccagcatctgcttttggtgtgggcttcaggctgcttctgttcacagtggaaggcaaaggggagccactgcacagagatcccatggcaagaacagaaacaaaagagcacggaccaggcatgttggctcatgtctataatcccagcagtttgggaggctgaggtggatggatcatttgaggtcaggagtttgagaccagcctgtccaacatggtgaaaccctgtctctactaaaaatacaaaaattagctgggtgtggtggtgggcacctgtaatcccagctacgcaggagactgaggcaggcgaatcgcttgaacttgcgaggcagaggttgcagtgagctgagatagtgccattgcactccagcctgagtgacaagagtgaaattccatctcaaaaacaaaaacaaacaaaatgagcacagggaaggtgccaggctctttttaacaaccaactctcaggggcactctcatgggaactagtagataaataattcattctttactgcaaaaacaccaccaagccattcatgagggatccactcccatgaccaaaacacctctcactaggccccacctccaacactgggaatcaaatttcgacctacaacttggtgaggccaaactatatccaaaccgtaacaccctcttatttggtcagtcactactgctgagaggtgggtggaataattcttcattcagcattaaacaagaaaaaatagatcctctctgaaattgcccatgtattttgctgtgctttaaaaaagacttgtagatctattaccacttgtaaacttttgcatatgtgttcttttaagcatttttcttttttttttttttttttttttttgagacggagtcttgctctgtcgcccaggctggagtgcagtggcgggatctcggctcactgcaagctccgcctcccgggttcacgcagcatttttctttaacactcaatagagtatcttcatggatctaatgagctccaatatttcccatctctccaaccctttttgtgcttgtgttagtccattttacattgctgtaaagaaatacctgacactgggtaagttgtaaaaaaaaaaaaaaagaagttgatttgtctcgcggttctacaggctgcacaagaagcattgccccagcatctgcttggcttctggtgagccctcaggaagcttctacttgtggtgaaaggcaaggtgacatggcctcccacatgacaagagaggaagcaagagcgagaggagggtggtgccaggctctttttaacaaccagctcttgggagcactctctctggaattaatagagctgaaactcactcattaccgtgaagacggcaccaagccatttataaggatccacgcttatgacccaaacacctcccactgggccccactttcaacactgagggtcacacttcaacatgagatttggagaggacagacatccaaactgtatcagtgttcttgtatctgtggagcatcagaatcaccaagatggatttttgacaatttcaggttcatagctcccacctacagcgcttcctggaccgagagaaccccctccgcaggacctggtaactgtgcagagctcttcagggcttccagggagctgccatgtttgggccctgctgacctgactttgcagagtccctgctgcttctttgagggagggaggtgtgatgagaacagtgatgttgatgaatgtaaaagcacttcgcagactgcagctctccgcacatcgccatgggcaccctctgctttcattcttccattctgcgattcttcctgatttctatgctttttctagcacctcactgccctgctgccgacgcttctgagatgaaagttgatctcaatccttgtcattctgataacactccagcttcacatcttgagataattccaaggttccttttatctgacttgcagatggatttgcaaaatatatgtaattcatttatcacctaggcttgacctggttacttctaccatgaggtaactagggctctgaaactggagttactggtgcttcaggtgagctatgcctgtgcccctgtgtaacaccaaggagcggaacctgaccccaacaggcaagttcatgggaggaatatcagcttctctgtgcttcttttcttatggatttttccatggcacatatgggaagtggggatcaaatgaggtcttttctgactgatacagaattgttttcccctacaggtttttgggggcatagttccaagcacactggcaattttgcctcattccttaatgcagaggtatcatgcttttcaaaatacagaaaaacgccactgaattttactcactttgatcctttactatctgggcttttttttttttttaatagactttattttttaaagtaggtttcatttcacagcaaaaccgagtggaaggtacagaggtttcctgtacacccctgatcccacacatgcacagcctcccttgttatcagcatcccccgcaagagtggtacatttgttatcaatgaacctgccttgaaagatcattattacccagtggacatagtgtatattaaggttcactctgggtgtttattagtttccttgaatatttgaaagactcaaggaatttccttctgaaccagttttccagccaaaaggaaactggcattttttaaaaactaggacattttctctccctttatcctcttctcttttttccttcccactcccctggtaggtctgaggtcccttaaagttgaggtgagggtgggaagagacaggtggggacagcagagtcaggtgtggtggaagaagggagggcagaggaccagctcgtgttccatgtaccaggccgagaagcatattcgtgtctgtgggttcgtttgtgggttatagttccgaaagttgatataccacaaatacaactctctggaaattgaacagccagatacgaaatcaatggaaatcaaacccagtctggaattgttaatataatctgtcctcaacccagaaaaagcagtgagtgcttcagatggtacaatgtgtactggcccctggtaacctttgcgttgctggctgtgcccaggatgtttatttcttttgccttacatttataaaatggatctcttggaaacttcagtactggttttctaaacatccttttgtgattctactttgtacttgcctgaattctgaagtgatctttcttcaatagttcattcatagtcagtcatccttgatctatatatatttttttactgattcctaaaattttttggtaagtttaattcatctctcatctagtaatgactttaatagtctgttgcaaatatcggattgcttttccattgctcaaatatcagtgtgcagtacatataaaggcaattcctttgtttaccaaaggacagttcccactaggttaaatctattgctccatctggcccaggggatgggttctgttcacttagtgtttccaaatatagggcactgtgttctagacactcttgcttctagtaaggcaatgttcaaaatatcatctcaacttctagtaagtacttattagtaaaacgcagatgctctctaaccagagctcattttctccaggtcttatctttatgtacatagtatatgtacagaatcccagtgactgcaaattcctggaatatgtattatgtgtgtttatgtctctaatttgctatctctccttgtatgcttaatgttgaactttaaaaccactttttgggaattgttacaaaagctatgtttactacatactatgtgtatatatttataatacataacctaagaatgtgttgctcttgatcctttcggctgggactgttagttatcttggtctctgaatctggtttctgtgtatgtgagtatgtgtttatttgtatattttgtcccatttttggactcacagaaaattaaaaacctgcaaaccgaaactcaccgtgaaaatatttgatataggtgtttttggatgcattttaaaaataataagtattctcattatttaaacactattgtaacacttcagcaagatgcagatttaggcctgaaatcaaccactggaatatatgaagaagaactgatttatggatgttactttatagagttttattatacacagtccccaggactatatagccaatcccagtagggcttaatcaggtaccgttaaatactgggctttaggaccataatcctaaactgcagaatgacatttatctaaagtaattaccttgtgactcaaccacatttcactagtatttgctaatctccctagcatatgggatctgggaattaaaaataagcagatcaaataaattacattttatggtatccttagaggatacaatttgactttggaattgaaaatatgtttgattgcgttactttgttaattttttttacaaggaaaaattaaaagaaagaaattcttctatatgaaaatgttactgtatagctttaaaggcagtaagaataaactcgtagccatgaattaccaaactcaatgcctttttgtctgtttccagctaacacctgtgtcccctggaaggcttgggtagcaaatgtgcccacctaacagtgggaaaaatagcttctgctgggctggcaaaagcagaaagtcgtattttggaaagagtgaagaaaaatgtcaatgctgacctcacactttctcccagtttctgtccccatccccactcccctcctctcacacctgggaggaagtgagaaagttgctacagtttaggattatgaactttggaataagacaaacctgggtttgaaacctggcttgcccactaactggctaagcaaacctggctctgctgtttgacattcctgagcccctatttcttcgcctgtaaaacagggatgagagtgtatacctcaccagtttcagagataagatttataaaaggtcctaggtgaacacttctggctcagagattgacacaaagtgccataaacagctgctcagcccatggaactagcaaaaggtggtctcagtcctgagggtggggactaaaactaggtttcccgccacctccttgaggctgcagcgcattccccagcttctgccagaggaccacatatgcttcttcgtttaaaggattctcttacgatttaaaaggacctgctttatccagagtcctgtcttctttttcattcccattgatcatttgtgttttgctgagatgtttttctatactatattattcgtctttttaaaaacaaaacacagctttcattttcaattccttgttgttttgtattttatcatctttcttcgaagtcctttcagtttactgcattcttctcgcttcttaaattgaatattgagctaatttgtttccagtctttctttttcaaaaaagaaatgcatttaaacctatacacttctttctaataaacaccatagctatgctccacaagatacttttcaaaatctgttattgtttttctttagttagtcatgtaggtacatatatttttcctttggcttctggtacattgggtgttttccacttactgcatttggtcttggattgtcttccagcccacccgcctttcctgtccccattagatgattctctatttcctttatttcttctactggtgtggaagtttatataagttctattgatttttttctactttccatgctcttttaattacaattttaaaatctaccttctttttaacgttctcagtagtctgttttgtttttttttgagacagagtctccctctgtcacccaagctatagctgtagtgcagtggcaccatcttggcacactgcaacctctgcctcttgagttcaagcaattcccctgcctcagcctcccaagtagctgggattatgggcgcccgccaccacgcctggctaatttttgtatttttagtagagacggggtttcaccatgttggccaggctggtcttcaactcatgacctcaggtgatccacccacctcggcctcccaaagtgctgggactacagacgtgagccaccccgaccaggcctcagtagtctttaaaagttaatttaatgtagtcccagctactcgagaggctgaggcaggagaatggcttgaactcgggaggcagagcttgcagtgagccgagatcgcgccactgcactccagcttgggcaacagagcgagactctgtctcaggaaaaaaaaaaaaaaaattaaacatggtaaagttggattctccaaggtagatctagaatctgttattcaccattggttctggtggatgatctgaagtgaagatccgtgtagcacggaccctagccaatcaggagagaggcctgaccatcagctgagtaccctgggccaccacgtggctcacaatggctgaatgcccaccttctacgtgacatcccacatgtgagtgtgacaccctcttagtaccaaagaaaaatcttcacttttttttgtggtgaaggtctgatagtagtacattcttttattcttatatctgaaaacatctttgttttgcttaatttttgactaataacataaatggagatggaatcctatattgacatttattttccttcagaatttttgtaatgattttctagcgacgatcttaactttgtcagtaatctttttctctctgataggttggaatatatttctctggctctgtaatagtctgtagtttcatataggcaagacatgggtttctttcctgcttggcttgtaatctttctagaatccaaggattctggctgtttgtcagttctagaatctccttcagattttagctcttcaaatattgtctcttctttcgtcttcttccaggtctcctattaaagagacattggaatttatcattcttttctctatatctcctaacttttctttcatattgcctacctctacccctctgtgttatgctttgggtgatttcatcaaatcagctttttttcctcactgcttctttttcttctgtgtctactctgaagttttattgaggtttttttttggatctgctttcagaatccaaattaatttattataatttaattatgtacctctgaacttcatatgtattgttgctttcagatgatccaaaaaaacacagacccatcaggtcttttgcttgctttctgtggtgggctgtggtctgtgtgagaattgttcccctttggttatgttgatttcctttgatccctatagcccattccctctacctccctctgtcgttacaaatgtgctaatgtgcatctttctgtgttttgcacaatgcatattgttgttttgtttgcatgtgggtttcaatttacatcatcaagttgtattatacatctttcatcttcatccacactatgtttctggaactcttccatgtcacttgaaaattaaattcctgacacctaactgctgcactgtactctatggtctctatactgcacattttatgtatccccattcccagggatggattctaaaactgaccaacaaccccatcatacatcttgctgtgtccataatttattccttcctatgggttcttgttctcgctgacttcaggagtgaagccgcagaccctcacagtgagtgttacagctcataaaggtagtgtggacccaaaaagtgagtggcagcaagatttattgtgaagagcaaaagaacaaaggtaccacagtgcaaaaggggtcccacgctgggtgctgctgctggctccagtggccagcttttattctcttatttggccctgcccacatcctgctgattggtccattttacagagcactgattggtccattttacagagtgctgattggtccgttttacagagtgctgattggtctgttttacagagtgctgattggtgcgtttttacagagtgctgactggtgcatttacaatcctttagctagacacagagcgctgattggtgcatttacaatcctttagctagatgcaaaagttctccaagtccccaccctacccagaagcccaactgacttcacctcctattgctacagtgaacatccttgaacttgtccctttctgaaggtgtgtaagagtgtctctgggctattcacagaagggtttaactagatactgccggatacctctaggctgtgacggtgttagcctgcactctatttttctcagtgcatgagggttcttctgttcctatatactcaccaatccttgcaaatacctggttttctaatgtaatgcccaactttgtttttactaactctgtttttaggcttgtttccacctgaattgattctcccttagctaagagagccagatagactccatcttggctctttgactggcagccccttcctcaaggacttaacttgtgcaagctgactcccagcacatccaagaatgcaattaactgataagatactgtggcgagctgtatccgcagttcccaggatttcgtctgattgataacgcccaaagccccgagtctatcaccttgtagtagtcttaaagcccttgcacctggaactgtttactttcctgtaatcatttatccttttaactttttgcctacttaacttctgtaaaattgttctaactagacccccctcccctttctaaaccaaagtataaaagaaaatctacccccttcttcagggccgagagaattttgagcgttagccgtctctcgtcgccggctaataaaggactcttaattcatcccaaagtgtggcgttttctctgacttgcctggatacaacataatggaggccccagcaagatattaacgccactgggcgagagccagtctcgctccgggctcccccggaaggacagccggctcggaggggggcgccacctgaggaaacaattttcaggtccccaaagagtgaccgtcttccggaggagagcggatcgactaccgtgtcagtgccctaaaattcaacatctgagtcctcagcttctcaccccggggtcaggtaggtcagatttgactttgttctggttctggtaagagggaagcggcctggtcgccggctaataaaggactcttttttttttttttttaataaagcttttgagtaaataattttatattttcaaatttctccataataagggatggtgaatgaatatataatacataaataaatgaatattcatttatatatcattacatatattttgttcataatatatgaatgaatggatgaattaatttataaatttatgatatataaattcacatagaattttcactaagataccctctcgtgccctttccaatttgcatcttatttttttttttattttattgttattatacttttagggtacatgtgcatgacgtgcatgtttgttacatatgtatactcgtctcaaagtgtggcgttttctctaactcgcctgggtgcaacgctaattgttgatagatgcaaaggtataaaaagatatttcgtgatcttagccctttttatgattattagttaattctaggagttttgaaataatttatttgaaccttacgtaaaaattgcgcatttatatcttttcattgtgctcctatggggcttcctgtcttcttctgttggatttttcaggagttctatatatatattataagtattaaattttgttgattttagatgttgcaggtgtcttctcccattctgccactatcttaacttgtctctgttctcctgtgttaaacagaaactcatggtttctcttaaatgattttttgaattataatttatatacaataaaaggcactgatcattttttagcttaatatgttttgtcattggaagacacccaagttgacaccacctaaaacaagatgtagaacattcagttaactgtccccaaagaagattcccttgctcccataattatcagtgtcccagcctgcacccaacccagatgcaatcctttctgatttgaacacaaattagttttacctgttatgtaaatagaagcaagtggtatgtattcttaggtatctgatttcttcttttaaattataatacttctgaaattcacacatgttgttgctgatttcagaactttgtttcttttctaaacatttttcctattctgttgccagacttttgggctgtttccagggattgactaataggagaaaggctggtatgaatatttttgtagaagcctttttgtgaacatatgttaggatttctcttggggaaatactaagtgggatggcatgtttaactttataaaacttctaaaaggtaccacttaaactcttgccagaaatgtatgatagttcttgttgctccatattctctccaacttttcatcccaacagtattttaaattttaaccaatatagtgtgtatgagatggtattgtattattgtttaaatttgtctttatctaattactaatgatgctgttacatgtgctcattggacgtgatatgtcttcttctgggaagtgacaattcaggtcatttgcctaatttttcttgggttgccttcttactactgagttgcaagagtttttttttttaatatattttgggtatgaatcttttgtcaagtataatattttgtttttaatttgtagcctgcctacctatttattagtgatgcctttcaattagcaaatttaaaaaattgatgaagcctaattcttttatttttctctagttaattttaacataaggagttgagtcggactcaaggtttatttccctccatctatttatctgattcttacaatattatttatgaaacaggctttcatcccctgtcacctaattggctttgcaccttgatttttaaaaagagccgtatatgtgtagatctctattctattcccgtaatctaattgtctgtcttatgccaaaactacactgtcttaattatatatgtttcattcgcgtccgtgtgaagagatcaccaaacaggctttgtgtgagcaataaagctttttaatcacctgggtgcaggtgggctgagtccaaaaagagtcagcgaacagagatggggtgggactgttttataagatttgggtaggtaaaggaaaattacagtcaaaggggggttgttctctggagggccggagtgggggtcacagggtgctcagtgggggagctttttgagccaggatgagccaggagaaggaatttcacaaggtaatgtcatcagttaaggcaaggactggccattttcacttcttttgtggtggaatgtcatcagttaaggcaggaacaggccattttcacttttgtgattcttcagtaacttcaggacatctgagtgtgtatgtgaaggtcacaggggatgcgatggcttagcttgggctcagaggcctgacaatatggttgttctagaaatcaaattgtataattgttttgagatggtagtgattactaatgttttattgcagtcttaaaaatcaggtaccttagccaggtgcaggggcgggcacctgtaatcccagctacttgggaggctgaggcaggagaatcccttgaacccaggaagtggaggttgcagtgagccaagaccctgccattgcacccagcctaggcgacagagcaagtctccgtctcaaaaaaaaaaaaaaaaaaaatcaggcaccttatgtgattctcttttttgacattgtttggcttttgaaatgtattatcttgccctactgcactacctaagacttcttgaacaatgttgaatattgattagaagtgactaaaagtgatgagtgaatacctttgccttgttcctaaccctaaggggaatgtttccaataattcagtgttagatatcatgttatttgtatatcttctgtaaatgccctttatcagattgtgaaagttctcttttattcttagttttttgagtatttctcataaaagaagctgaatgttgtcaaatgctttttctacatgtattgagatagttatataatttttcttctttaatctgttaatgaaatgaattattttgactgatttttaatgttaagccaattttgtattagaaaataaacttgacatggtcatgacctgttattctttttaagtttatagcatccaattgctaatattttaatagatctttgtgtattggaccataagggatatttttcttttttcttaaacttataatgttttttgtaggtttaatatctgggtcgtgcagtctcagaaagtcatttgggaagtgttccctcctcctctattaaaaaaaaaattgtgaaggattggtaattggtattacgccttccttagatattgacatctagtcaggagttttttcttttatgtttttgttttattttatgggaaggcttctgattacaaattccatttctgtaacaggtattaggctatttagatgttctattttttcttgcatcagttgtgataagatgcgtttttaaaggaatctgttttatataagtggctgtatctttaatggcataaagttgtttatgatattcccttatttttaatatctgtagaacctggagagatgctactacttttattactgatatagattcttttcattttttcttgacaatttttctagaagtataccaattttattaaactgtcttaaacaaatttctcacattgttaattttcttttatgtgttttcattttatttctgctgtttttattatttcctttcttatattttagttgtttttcttagcttattaaaagctaaaactttttgttttacaacttattattttcaattcaaatagggaattaaagctatgaatctccctctatgcaccaccttcactgcctttcacattttgatatgttgtgttttcattttcattcaattcaaaatatattttatttttccctgtggtttttctataggtcatcatctgtttagaaacatgttgtttaattttcaaatatttgagtagttttaaagctatttattttcatttatttcaagtttatttatttatttatttgagacagagtcttgctctgtcgcccaggctggagtgcagtggcgccatctcagctcactgcaagctccacctcccgggttcacgccattctcctgcctcagcctcctgagtagctgggactacagtcacccgccaccgcgcccggctaatttttttgtatttttagtagagacggggtttcaatgtgttagccaggatggtctcgatctcctgacctcatgatctgcccgcctcggcctctcaaagtgctgggatcgattttaatattattgttttcagctatcatactttatatgaattttatcattatgatttgctggggaatttttcatgttgcagaatgtgattcatcttagcaagtgtttcatgtgatcttctcaagaaattgtagtgtatagttgttgagtggagtattctattagagataattatgtaaattttgttgacagtattaaaatctcctatgttctttgatttttggtctacttgttttatcagttataatgagaggcatattaaaatcttccatggtgaatgtgagcttttcaaaagcaacattcttcctttagtgctgtcaagttttgtatcatgcattttgaatctctttattaggttcatacacatttaagataattacttcttcttgatggagtgactcttagcattagaatatactcctttttctctctgggttactatttgtcttgaattgtactcggtcagatataaacatagccgtcgagatttatgatgcatagtggttggatagtatgtcagttttcaacattttattttcaaatatctatctctttatgctctaagtgtttcttgtaaaagtcatttatttgaatcttatttttaattagtatgtaagtggtatttcatttatatttaatgtaattatcaatacaattgtatttaagtattttaccagtatttgtttctctttcttatttcctgccttattttgcataatccagcaattaactttttaaatatactttgtgttattttttaggagtttgctagaaattacagtatgtatacttaactatcatagtctaattttcaattatactaaactttaaaaaaatctaagactatcacaattatataattctattctctcattctttgtattcttttgtttcactgtattctataaaacttataacacattgctactggttgtgctgaaatgcatatatatgtacacacaaacacacacacacacacacacacacacacacacccacacacacacatgttgagtatcccttatcccaagtgcttggtaccagaaatgttttagatttcagatcttttaggatttgaatttgcatttgcattatatacttagtagttgaacatccctaatgaaatgtgcaattctccaatgaggatttctttggaatgccatgttggatctcaaaaagcttcagattttgggccaggtgcagtggctcacacctgtaaacccagcactttgggaggctgaggtgggcagatcacctgaggtcaggagtttgagaccagcctggccaacatggcaaaacctcatctctactaaaatgggaatatttcagattttggatatttggactggggatgctcaacctttaatatgtgcttaatatattatgcaacatgtatgtctgtatacaaacaaacacacatgtatattaaatataataagtaggtcctttatttttacctatatgttatactacctatgttttcattctttcctgcagatttgagcttctatcatgtatgatattctttcagcctgcatttctttaagcatttcttggagcacaggttttttggctaaaaaaatctctgagttcttctctagctgaaaatgtctttacttagctttcattttcttaaactgatacatattagatgtccatatcttcaggatacatgtgattttttgaagcattcatatcaagtgtaaagatcaaatcaaggtaattgagatatctatcaccttgaatattcatattttatttatgagaagaatatttgaattgctctcttctatagcttttatttttttatttatactttgactaaatgtagaattcaatgtagaattctatgttgacagttttttttcagcattttgaattttttttccattgtgaggaactcatccatcattcttttcatacttcccctaaatataacatgggctattttttcttgctacttttaagatttcttttcaatttttttttcttttaaggttcacctctgatgtacctaggtgtgattttgaaataactttttaaaatcttatgttgtggtttgctaatcttcttgggtatgtaccttgctgtatttccttaacttaaaaaatattggctattgtctcttaaaatattttttctcctgtatctctcttcttcttctgggattccaattgtttatattgattgatatttttacacaggtcttggatgctttgttttatttttttcatgtttaatttctttgtgttttattttagatattgtctattggcctgcctttgattcttttctcttctatgtccagtctgctattaagcccatcaaatgaattcttcctacctagtatcatacagttacgtcctgatagttccatctgagttttgctttcaccgtttgcttcccatgctgtagttcttcacctgttcacacgtgtcagtattttcctctagagccttcatcgcagctacaaagttcctgagtgataaatcaaacatctgggccatttccatatttgtttctgttaatgagttatcttttaaacatgggccttgttttgttgtttctttgtgtgtcttgtgactttctgttttatgctaaacattgtgtgcagattgaagtaaggaatgtttaccttgcccttgcaggaaggacatgctccttctgtccttctgtcgggctggtgatgtggggctgagtcaatctgacatgtggctgggctgtgctgggctctgttgcagagttaggatcctgagctagattctctttaccttgggttcacatggtgtgaaggtggggtcagcactttgccttcagaagggcttgggatctgagcaccagccagactctttgaatctttgtgctttactgaccagtaaccagctttccaaactgtgggagatctctttctgctttacagcttgcctgccagctctttgagtttctggggcattctctttgctctctagacctgttcttgactttctgtacctggggagatctctttttgcatcaatggactgccctcagcctttgaaggccactgcagggtacttggggaatgcagagatccacctcagttctcctgcactcatcccagcttttggcattcattttgttcactacatttgtccttgcttccttacgttcataccacaaatttttttttctgctgtttgctaattctatgttctatatattatttttatattttaaatttatattttgctctcttgacatctgaaatccagtgtgaacacacaaaaaataagtaggaaaaactccaagtttcataaaccttacctaaagaagtcatttctaatttattcataattgaagctcctgaaaggtctgatacagctctggtacaagggaggtatgtcagtcagggtccaccacaggcacagaaccagtaagttatataggggacagatagaaatctgaagaggaagcgcttgaagtgtttttaggaattggcaattgctgtagcaactatggggcggggctgagagtgtctgaaatccgtagggcaggctgtcagaaagggctggctagaactcccaggcaggagctgatgccgcagttcacaggagcaattttcttctttctcagggaagcttcagttttcctcttaaatcttttcgactgattgaatgagggccacgtaaacgatcaaagacaatctcctttacttaaagtaaattgattacagctgttaaccacacctacacaataaccttcatagcaacacctagataagggtttcatcaaataactggaaactatagcctgacccagttgatacataaaactgtttatcacaagagtaagggtctattccacagtgtggcacagtatgtgttaaagaataaactgtaaggaagaaaataaatggaagcaagaaaatgaaagggctgtgaatcctgacatcatccaacagcaaggcaccctggggccagctctcctgcacagtgggtaggtctgtgtccagttgagggaccctcctgcacccagtgactctcccttcttgtaagccccaaagaaatgctactaggcagggggataaacagcctatctgggattaggcatcagctgttactggagttgtctgggacagccagctgcccagcacctggagatgctgaggcccatgggaatatgtgggccctgctgccaagggaagaggcctcctgctacagccctcgtggtaacagaaaggaggacccccttcttccagttggctcattgtctagcctgccctgagtgagctcctggggcctctctcacatcattctgcccactgcacaaaattgtctgcttatagggcagacattaaaatgctggtattttattctcaaagtgtaagattattatttatttttattttgcctttctacccatctgtatttactaaaacttttactatgtgactatattaattctataataaaaatcaatataacttccagcattttaaataaaaatggagacaagtttatattccccgaggaagaaaatatcattttaatattttgtattttccataagtctccacatataaataccttaagcatctccttgaatgtacagcctggagtgtttctgtgcctgcagtggtctgtgggaaggacaaaaaacaccctaagacctgggagaactcctttttggaggcaatggggtagcttgtataatcagaatattggaaatgattaatccaaattcattgtcttttttcaactagaccagcaatcttaaagaaaaaaaatatatatatttgaaccatactaacacactgtgctttaataaggatagacaagtaactttgctaatatgctctctttctccttgcttcttgggaaactgtcagaatggtataaaatttagataagatgttgtgacttagaaaagaatttgatacaggaagaagggggtggtacacatgcattccccattcattgctaaatgcttcaatcaaacatagtttacgtatcagaaatggaaagaagaagagacaggaaaacatactgattatctacactatcaagaacactagaggcggaggttgcagtgagcggagatcgcgccactgcactcctgcctgggcaatagaatgagagtcagtctcaaaaaaaaaaccaaacaaaaaaacactagatcaagagtggtagttttgtagagaataaattcttatagaaaggaacaaaatatcctaaagactgaattttaatgtttttgaaactagtgtttctgataattttcaaatccatgccatttaacgaggaataggcagagtgcttatgttatgcctgatgctaatctaagtttgggaatgctaacacattagcaaacaaaacatcccagcccttgaccttgtggagctggcattcccgtgaggggagacagatgttgggcctgatgagtaagtccattgtagaatatgttcagagtgataagtagggggaatgagatgaggaggggcatttggggcgtatggataattatagagacagatgtttgtctgtgttccttgaagtggggcttctttggtttagtgcatttactagtggataactaataaaaaacggctgcagtcccttgagccttatttcacttggatgtccattgtcttctagagcaaattgttattatttggtgtggagaggagatgcggaaacgcagagctctggctgtgtcctgagcactaaaccaggcactttcatttccatttccttcgtcttagcaaggaagacaaggaggcattaagcagctagctaccttgcacaaaggccgttcaattaatgggtggtggaagaccgggaggccccaaagccggggccaactatttgctaggcacagtaagttcagtgtctgaaaccaggatacgttttggagcccatgacaattgttttaatttcttttaaaatcagaaggaaaaacatatgtaatccagcctgattgtatttgtctttatacttacagagtcataaaatgtaacactgatttttggggagggaggacccatgagcatcttaacatggccctgcttatgtgtctttaataattctgttgcctacaccccttctgcttgttgtttcttggcatttctccttcgcactgaaaggatgcttgtgcttacggacttgggtcatcttcaacctgtgtccatccccactttcctgtgtctcacagagggccaatgaagccaaggctgttgtcagcaagtatgatgctcagcatttggtagggtgcaacacatatttgttcaatgagtgaatgaatgagcaaatacatgaatacatgagtggaggaacctggcaatagcagtagtggtgggtggggggatatttacttctcttcctagcagactttttttcaaagaaatgtggcatcagcccactgaatgttccagccaatgaaattattttcaaagcattctgtgtcacaaagcccatatggctctgaactaaagggagaattagaaataatctgaaactcagttaaagataagtttgctaaatccagtgcatgatgaattcaaattacttttgcataatgaataatgtgttgggtggtgagtagcggtgtgaaaagctaaattgtgataaacgcaagcttgcaagagtcaatgaatgtctggagagtcttaaactacttaggtgcagttgaaggtcaaaagttcagcaatgtctggcagagtagatcacatgggattctcttgattatgttagtaagattttatgatattactttcagtgtcttgtcttctctggatgatggctggtaagcatgtttcaggccatggcattcttgttatgatgtctccagagagactccccagcatcactagccatctagggtggccgtttctgagcgtcaacagtgccaaagcttctgccctgtctcccaaagcacatgcttacagcaggctaaggagaaaaccctgaaacatgaaatgtaggacaataataatatatgtgaaagaggaaaaaggatgacatcttaatgactgatttagcagagagggtttacagagtttggcttacgtctagacttaaacccttttggtttgagaagtcatgttttagttatctttatgtgccgtttttcatgaagcttctcttggctggggtgtaaagttgatataaaagggtacatgttgttggttcatgcgttcatgctgggggacctgcatgtgtggaaatgacaggagtgacaagagtccaattttacaaaataaactgggactctgaagttttggaggcagacatttgtgattccttctgtgtagttgaaagtgattcacctggcggtattttccctctgttgaagttgaatccccctttccatgtgatgttaaggatgcatgtggacaggcaatatggcccttcttcagataagacactctgggctgctggctgcggttctgggacatcttgaagcccccgaggcactgagtgtgaacatgtgggtgctgatgataattcagaagctatttagaaggtagggacagcaatggaattttgtggaaattaattccaatgtaagtgtgatatgtcacttatccaagggtgttccttatgtgtgacctatttctatgacatcagtggcatgaggcttctctgtgaacatattaatatcttggcattctttggttgagattagcatcagtcagaagctgtggataggctagagtcagctcaaaaacccctgatcacctaccctgacccctgagagtttattacgtagtcacagatggcttctctgttctataagagtagaacttcctcttcatggtcttcttcgagctacagtgtctctaatttccctaaatggctgctcaactgtcaagagatgtaagccctattagccgcattggccattcagctatagacacccagtagccatggtgggtagcagagcaggtctggctggagaggagaagccagtacctcggctactggaaggcagcaggcatacaaaggctgcacttcttggctcctgtcttatgtctttactttgttgtcttcacaacatggccttaaagtattttggaaatggcaccgtgttgggtcatgtgtgtcaggggagcagtatcctcccctccacctctgcccatcccacctgggcctcttcccttccaatctccaggtgctcaccttggaggcacagggagcaactaggtctgtacagcacaccttgctggcacaccagttctccttattgccaagcagcttctcaccctaattaggtattaaaataaacttgcatttgttatggaaagaatgtggctttgtgtgtttttaaggcaagacacaaaattttaggaaattttatttcttgactggcagaataggacacagaagggtctagccttggcaggttcccgtttcacgtgctcattccatttagtcttgaaaacaatcccatgagtagagacagacctagagaaaggaacaaagtggctcaaagtgacctttttgtaggaggcagggttggcaggatccaggcgagatacttggtgctgtcctcagccctaagtccatgccccaaaacaggtcaaaggaaggccagaagtattgatagagaagtagaggaaggaggagggtggtgggaggtcaacgctgagtaaataaagcaacactgcctcttccctctagcttctttgtgtgcatagtcagaacaatttctccaaatttactctgaagattagttactggcatccgtgaagaacttggaagggacaaacgtaccattgttttcatttttgttcctcacaggaaaattcatactctcaaaatcattgttttttcccctgcagtggtctgttttgtagagttccctaaccactttgtttccagtggtaactgtgtactttcctctgacacaagattttaaggaaaagaaactaccaaagatgttttatgttgatttctttttccatatttaggactgctgaccaagcacatttattgtggttatcattaaatgtttgacatttacaaacagcagggcacagagtacgcatctctcagatgggcgggaagcctgagaaccaagggctttcagccgcgtgccttttgcatggctggccttgctcacagctctgctctcactctgcctcccttctcccctgaaatgtgctttttcataggaggctctttctgttttggttttcctgtttttatggctctgcttctaaacatataactatatataaacatataaacatatataaacatataaacatatataaacatataactatatatacacatataactatatataaacatataaacatatatataaacatacaaacatatataaacatataactatatataaacatataaacatatataaacataactatatacacacatataactatatataaacatataaacatatatataaacaaacataaacatataactatatatacacatataactatatataaacatgtaaacatatatataacatataaacatataaacatataactatatataaacatataaacatatataaacatataactataaacaaatagatatattttgttttacaaatttttattttgttttatacatatataaacaaatatatatatatatttcaaaatatagatagtattatcattgatctggtggaactctgagaatttctggattgaagttctcagagttccaccagatcaatgataatactacctgtatttcaaaatataggtagtatttctgctgcttctctatgatgtgttagtagtagatctcttgatctcaggtgacttcaagctgggagacaaactatctttgtttagcaaggacagagaagttaaccagttgcatgactttcagtaaaaaaaatgagagagtcctggacaaaccaagacagttggttgacctgtgagtggtttcagtgtgcaagaacacactggcagttttgacattttgagatgtggtggctctcctagataataaactgtcttccacttctgtgtaagcttttcttagggataactcaccctgcttcagcaaatccgggcgattgtctctatcagccaaattctgcacatgtagcctctgaatctaaaataaaaattgaaataaaaagaaaaatataagatgctttgtttttgcgtctctctctcctagccgttgacttttagtgcatgtcgtgcaggcgacagacgtattgctgccctttctgtctctggtcctttttctagggcaggatccaagtagtttttgtgagcattgcagccagggatcatttcctctttcccttttagggccacaatagtgacctccagcagcactgggtactgaaatacagggctttggctttcccaggctcatacacatagcagagcgtctggtttaaggtctgtataattttgtgtaattatattcaattgctcactcaatctctgatcactttctaatgagctgttattttcagaggtagtagaaaaatcagttcaggaagagatgatgatgtgagagaaataaatagcaaatgactagtgaggagaaattacacagtaaacatgatgctgagctttctctgagtgagtggtgtgtctagggaggtgtattatgaagtacattgctatgaagaacggcctgagactgggtaatttataaagaaaagaggttaattagctcacagttccacatggctagggaggccccaggaaacttaacaatcatggcggaaggggaggcaggcacatcttacatggcctgagagagaaggtgagagagcatgtgagagtctgggaaaaactaacatttataaaaccatcagatctcgtgagaattcactcactatcatgagaaccgcatgggggaaactactgcattgatccagtcacctcccaccagctctatccctcaacacctggggattacagtcaagatgagatttaggtggggacacaaagcctaaccatatcaggaggggtgtgttagttgagcagacacagaaaagcaaaacatttgagcccaagagtggaacccatcccttataaggagagaccacgatgtggggaaagtcagtgaaatggacatatggctaagtttgtttagtgtttgaaaatgtcaccgaagtcactttttaataatgaaaaatatgtggattgaagagtttaaaagagaagtatgcccagatgttattttaaaaattggagtgtatacaaagggcccccaaatctaggctgccttagtatttttgcccctagctttgttttcccttaagtgatgtcaggaactgccagtgttggcctctgcatctccaaaactgaagacagcttagttcactcggtctcgtcattattgtttcatgaaagcatgtcgttgggagatctgggctcagacctaagattgaaacaaaaaaggaaagagaaagataagaaaaccgtctcattttcaaaaaccttcacaaaccccacgttttattaaaatataaaccatttgaagaaaagccagaggaaaatagaggaaatggggtatcactgaatgaagcagaagctaaaggatgatcatataaattgtctcaaatagcaggtcaggaaccagtggcctgtcaccatgaaaacaaagttaggggaaatagacaaatgaaaacaagtgagtttacattattcctaagaactttctgccggtgagaaaataatggaacgacgtgtagtcagcatacacacaggaatctatattttgtaggttatatttcaaaggattcatgtaccctgaaaagaactgttgactgtagggtaagttaacaccagggggtgctgggtgcaggcacattgaatctgaactactgggttgccattttagactgttaccatcatcactgttaccacacctgtagtttaggtcattagataggtgtggaaatgaagcctggctccttatcaatcgaaagcctatgctcttaccaaatacactatgctatttaatattggtaatattagtgaaatttagccgtttcagagttttccttctttccccaaagcatcatttgtcaatgtttgttaacatacgacacttaatgtaatcctcataaacaaagtggacaccctcaagttgttttctgggatttttacataagcatatggtccttgagcaatgatggtttgactttactatgacaatatttggctttaccgtggtgtgaaagtgatatgcattcagtagaaaccatacttcagatttcaaactagatctttacccgggctagcaatatgtggttccatactctcttttgatgctgggcagaggcagcaagctgcaatccccagtcagctacactgtcacgggggcaaacaaccggtactctacaatgcattgtgttgccagctttttttggatgtgattttgcccaactgtaggctaatgtgagtgttctgagcacatttcaagtaggctaggctaagctatgatgttcagtatgttagaggtattaaatgccttttgacttgtgatattttcaacttacaatgagtttctccagacataatcccactgtaagtcgaggagtcgctgtattaacaacgggtagactgaaaacaccgatgtgcaaacctggttcagtacggatggggtggacatcggcatcagggttcttgtgaatattccccgggaacatggggaacgtggtgttgtgaaatctagagctggccaggaatttccggatccttacctccagctttccaccccacacagggggtccccctggagccacctgcctacctgactgcttatcttccagcctctgtctgagcttctctaggtaactcctacatccagggcaactaatttcctggagcaacagaagagccttccttgtattgagacaacatgcatggtctccctgcaaatgctgcctctctgctcctacatcttcacattttagtgtagaaagagcaatcgtgggtgagaatttaagcacaagtgtttagttcaaaagacagaaaattggccacgcatggtggctcaagcctataatcccagcactttgggaggccaaggcgggcggatcacgaggtcaggagatcgagaccatcctggctaacacggtgaaaccccgtctctactaaaaatacaaaaaattagccgggcatggtagttgggcgcctgtagccccagctactcgggaggctgaggcaggagaatggcgtgaactcgggaggcggagcttgcagtgagccgagatcgcgccactgcactccagcctgggagacagagcgagactccatctcaaagaaaaaaaaaaaaaaaaaaaagacagaaaattttaaaagcatcaaaacagccgttacagagagggaaaaaaagttcttaagtatcttagaactgcttcatttcaatagatgttgcaataagctgacttctatatgacttataggtcccgaatcattgatatttatgtttgcaaatttgtgtgttttgtgtaaatgagatcccagaactacaacataaacttctaatgaactctgtttctatacctatgtggatcctgagaggtgctcaaatatgagaggctgtttctcttaacctcctattctgcttaaaatcatttgtctttacttgtacttttttttttttttttttgagacggggtctcgctcttttcgcccgggccagagtgcagtggtgcgatctcagcgcactgcaagctccaccccccgggtttacgctattcttctgcctcagcctccccagtagctgggactacaggcgcccgccaccgcgcccggctaattttttgtatttttagtagagacggggtttcaccgtgttgaccaggatggtctcaatctcctgccctcgtgatcctcccgcctcagcctcccaaaggtctgggattacaggcttgagccaccgtgcccggcctactttaactggagaattcattcttccaaatgtgctcattcatggttttattttattttattgcattggattgtatcattgcatctcctacctgtgcattttaagagtttccacttcaaactttgtttcattatgaggtaaaccttaaaaaataaagcctgttttctggagtgccacagacattttgtcagaagaaaatgtgactgtcctttaatcgggcactgttttatgcacataatacaaatgatttctgcatgcttatcagatctacttgtgggcttataaattcacttcatcctggcatacgtagtgaaggacattcctctgtgccctgtcaagaataatcaagcttttaaaatcaattccagtggtgataaaaataacgaggatggtttgtgaaaagggacaaaaacttggtaaaaataacattgaaggatttacaatatacagagagaaagtgaaccatctctttgaaaataagtgtaaaaaagaaaagtgtatctaatatttttattgatgcataagctatgaagagaactatcaatgtttctgtcttgctctaaatgagatatgactggtgggatcccagatcatttgattatccgtttgcagactgctctgtttatttaaaacataattcactctctcattctatagatggacttactagataggagtctgtgctttataagtgaaattaacttagataatttttttttttttctttttgagatggagtcttgctctgtcgcccaggctggagtgcagtggtgcgatcttggctcactgcaagctccgcctcccaggttcatgccattctcctgcctcagcctgctgagtagctgggactacaggtgcccgccgccatgcccagctaatttttttgtattttttagtagagacggggtttcaccgtgttaaccaggatggtctcgatctcctgacctcgtaatctgcccatctcggcctctagatcattttaatgacaactgataaagagataatcaaatgataacctgtttttctcagtgatagaaatatgtgatggaaagtatctgagactaatgaaagacatggaaactaatttaccgatgatccttggatactagttatggaagtatacttatattatctatgcaaatatacaaggtcttttgaaaaccttttacatgcccaacgccaaatatattaagtgaagctacacaataagatactgtaggatcagtaaacaggtattgctaacgtttgtagcaaaatcctgttgatccacattgttgggtctttcttggtatggtctagtgagatatcagtgcgtgtgtatatatgtatcagtgcattttagttcattttgtgttgctataacataatactggaggctgacaaattaagaagaggtgtttgcttggctcacaattctgatggctggaaagtttaagattgagcatctgcatccagtgagggcctcaggttgcttccactcatgacaaaaagcagaagagaagtgcgcatgtacagggagattacatggtgaaaaaaggaagcagctgggcatggtggctcacgcctgtcatctcaacactttgggaagacgaggtgggcagatcacgaggtcaggagatcgagaccatcttggtctctactaaaaatacaaaaaattagccgggcccggtgttgggcgcctgtagtcccagctacttgggaggctgaggcaggagaatggcatgaacccgggaggcagagcttgcagtgagctgagatcgcaccactgcactccagcctgggggacagagtgagactccgtctaaaaaagaaaaaaagaagcaagagacaaaagccaaataagccagactctttttaacaacatactctctcaggaattaattcccgagagaaggggaatgcacacctgagggagggcattaatctattcatgaagtattttaccccgtaaccagaaaaacttccacttggccccacctcccaacactgccacactggggataaaattttagtatgggttttggcagggacaaaccacatccacaccatagcagtaaatattgatatacagttgacccttcaacaacatgggtttgaaccgtgcaggtccacttacatgtggatatttttcagtaaaacttacactgggtgtgcctgcctctcctgcctccccttccaccttctccacctctcccacctctgccaccccagagacagcaagaccaacccctcctcttcctcagcctactcaatgagaagatgatgaggatggagaactttgtgatgatccacctccatttaatgaatagtgctatgatatggatatttattcccttcaaacctcatgttgagatttgacccctgatgttggaggtggggcctagtaggaggtattgcgtcatgggggtggatccatcataaataggttaatgccatccctcaggggtgagtgagttctcactctgtgagctccctccagagctgatatttaaaaagattctggtacctcccctctctctctctgacttcctctgtctccatgtgatcttcacacagttggttcccctttgccttccaccatgagtggaagctgtctggggttttcaccagatgcctaatcttgaaccttccagctatcagaattgtgagccaaataaaccttttttctttatgaattattacccagacctctgtatactgtcatagcaatacaaaatagactaagacatatagtagtatattttctcttccttacaattttcttaataacgtttttttctctagcttgctttattgtaagaacactgtatttaatacagataacatacaaaatatgtgttaattgcctgtttttgttatcagtaaggcttccagtcaatagcaaactattagtagttaagttttgagggagtcaaaatttatacatatatttttaactgtgtggggactggacactgtggctttgttcaagagtaaactaaatacatagaatctcatcttctgaatattataaacattattagacgtgtctttcctcaaaggtgattattctatatagtgatttggtttggaggtagaaaaagtgcagagaaaatttaagcaaatattaaacatcactttttcttctatacactctatttttcttactgacagaatttttctggaacatttaacagtatcttctaacaggtacctctctcacccaacttgtcctcaagtaatccccctacctcagttgagctgtatatggtggctcacacacctgtaatcccagcactttgggaggccgaggaagggggattacttaaggataagacttcaagaccagtcaggacaacatagcaagaccccatcgctgcaaaaaattaaaaaaaatattagccaagcatggtggtggacacctgtagtgccagctactcagaaggctaaggcaagttgatcacttgggagcagaaatttgaggttatagtgagctatgattgcactaatgaactccagcctgggtgacagaatcagatgctgtgtcttaaaaaacaaacaacaacaaaaaacgttggtttgaaatttgacaaaatgttctgcattcacatttagaataaacgttttatatgaggaagttaatatgtcattttctataattaaatacaatataatgtgggtttaaaatttcattctgattcttattttggcatcattaaatatcattactcgatcttgatatttagaaggtttcagaagccaattactagtgcctcaaaaactcagtactgtggaaatgacatatcattgggttctggtaatgaggaatgactatttttctttggatgttactatcaaaacatttttataggcatctggaaaatatctgcctgattaaagagctgtgttttaaatgctcaagatcacgtgtgcttttttcttccctgtgttccccaagcaaatggaatgccatctggattctagatttggctttctcatgtaatggatgtgagaccctgagctagttacttaacatcatcaggctttctggaaagtgaggataggaatgcctgaatattgaatttaaaatattcaagttaatcatgtataaactataaagatttttgaaatataaaatatgcatcatttcattcactcactcactcattcttttatttgttaattcatccaccatttactgaatgccttctgtgcactaggtactgggcttggtgctacctactggaaaattaataaaacattgtctttaaggggctcacaatgtaatgggggaaatcaccaagaaaataaacaatttcaataccatgtgtcaagtgttaaattccagtacaacatgttggtggttacaaaaacgtaaaaacaaaaatgaaatattatgggagcagagattacacttagtatcctccagaaggttaccaaaatccattttatattttacatatagtttgttctgtcatcttctaagaatacctaaaaataggaattacctctataattttaaaaaataatttagtgcaatacagcataggaggagagtatgtctccctctatgtgagtggataaccgtctctgtaatatatacttttctgagatttgttactcatattctttactcagtactatattcagtacacaatggaattcctgttactgttgactagatgactgtcgaaattggctcatttccccaaaattgtccacaaggtgaaggacttgaggggtccctgaaaggctaggtccacagaagaactttccccatggtactggccaggggaaaacattcctagtcagagacaagtatttccaggatttaaactatctttccatttttgtaagaatgatagctgccctttcccctggatcttgcacctaagtaagacttagcagaagcagtctaattttattgtttgcagttatgttctaaaatgtttttaattcgtttaatccaacaatttgtcgcattaaaaaaaaaaaaaaaaactaacaatcaaaacaaacagccaggcatggtgatgcatgcctgtagtcccagctactggctactaaggacactgaggcaggaggattgtttaagcccaggagtttgaggttgtagtaagcgttatgacatctgtaaatagccactgcattccagcctggacatctagcatgaccctgtcttaaacaatacctctacaaatgacaacaatgacaagcaccctgattcaagatctgggattttttgtttcctcctccgcttggctttgctctgaggaggataagtcacgtaacctgttgggcctcagttttgtcatatgataaatgagaaaatggaactaggtgatctttcatgaaccttttatttttaacagtcttgttttagtgatcctatgactctgtcacagaatgttaaaaaaaataattcagaagaaaaatttacaggttgaaatggatttgagaattgaagcatgaattgctggcaggtgtttgcaatatacttttgggtgcaaacggatgtgttatcttgggaatgaagagtgagaagcatttagatatcacagttgttggctagaagaggaaggattggttaaaaaattaaaggtatatttggttaatgatatatatgtaaaaatcttatttgtttgcaaagagttagacacatctgaattttcttacattatacattgtaatgcaggggccttcttgcagggccttgggatgtgtcctgtacacaaataactgatacctcctgaaaccttgcatcaggggaatcctggtggatttccacattatcaccacaggcctttcaatataaaatgctgatttgaatgacatactgtcattgagttgatctctaaaagttgctggaaattttcagaagaacttgatcctcagatactacatatgccctttccaaggcataaaaggtaagtccagtggtactttcataaaagcactgcttaaatatataaacaaaaacattttgtggagttctacaatctagaaagaaatgtgacttgtgctgtttcttcttttatttttaaaatccaccaatagaaactgtccctaagaggctttgtcctttaatcctagctgattgttaaacggtttgttattaatatcttacaattcagtgcagatggttttgagcagtgatcagatgaacaaagatgcttagtgatggttcaatttccgggttggatttgcatcctaatcttagtcttaaaaaaattagaaagctgtttccacatgagctgtataatgttttacttttttactacaattgctgtaatacttcagtccttaagcatagaaaataatgcccattattatattgggtgaaatgaaagctttttaagtgtaaaacatgtaattgtagtctcaaaactatttatgtggcatcaattatggtgaaattagttcatgaaggtaggtgaaaatacataaacattgtgtatatgctaattcatctagataagaattttcatgtagatttggtcagctgtgttagatttaaatgtagtttcagatctggttcagatggaaagtagatgaagctgccaacctttggcagcagcacacaggtggaatagctgagatagaataggtgattggtgaagaagatagaaacatttctaacacatagaagatttcaggacagtgagtgtggcacattctagatgtttcccacactgcagcaatgggagatatacagatcttcctcagtaaacccctatttctagactacgtgagtttccagttgaatcagatttgagaaatgcagtgtgctaaaggcagctcttcttaactccctctgtgaacccaaggaatctgtctcattcattggaagggtctaggaagggaagagaactctttttttttttgagacgaagtgtcactctgttgcccaagctggagtatagtggtgtgatcttggctcactgcaacctccaatgcccaggttcaagcaattcttctgcctcagcctcctgagtagctgggactacaggcacacgccaccatgcctggctaatttttgtatttttagtagagacggggtttcactatgttggccaggctggtcttgaacccctgacctcatgatccgcccacctcggcctcccaaagtgctgggattacaggtgtgagccaccatgcccagctggaaatagaactcttacaatttttctgagtttatctctttacatcagctgcctccttactgtaaaccaaaaaatacaagtctaagccccccagctgactgaatggacacaccctcttggccaaagggacccaaggaaacctgaaaaggtagttcaggccatgacaggaacagaggccatcagacatgtctcattatacactctgccttttggagtttagacacgactgagcagcattaacattaaaatagagatcctaagatggacagaaagattcttcatagcaataagataccaaattccaacctaactttagtataatatcacataacagataaagaaggaaatcaaaatattttaccccaaaatatctttccttgccatattttggaaatggttctgcaaagctgtcttttgtgggggaaattttgcacctgtaaggaatccctattaacataactagatctttcatcttccaggccctcccaatcctgaagagattaacagagagtctagcaccttttaaaagtctgaatgggaaacatttgctatctattgtctctaagggcagccacctatgagacttcatctacataataagaacctcagtctccacaaccccttatcttaatccagacagtttctttctactgattccaggtctttagataataattggttggaataattgacaattccaaccaattgtcaatcagaaactctttgaatccacctataacctgtgagcaacacccccaaccacttcaagatgtcctgcctttctggactgaaccaatgtatacctcgcatgtattgattgatgtcttatgtttccctaagacgtgtaaaaccaagctgtaacccaaccacctgcagctcatgtactcaggacttcttgaggctatgcctcaggccatggtcattggtatttggctcagaataaacctctttaaatatttcagtttggcttttttcattaacactacactttttaagtttgacctaaaggtttctctgtacatagtgaactgtcatctaactggacgtgtaaagggactgtaatctacactgtaacaagtagctgagtctcagccaatcacagcatcccagtttcagccaatcacttgcatccaactattcaaactgagctcaaataagcctgtaagcagccctgctgtttctgtgcctctcgtcccttttgtctacctcactttcctttttctgtccataaatgttatcccaaccatgtgacagtccctcagttactctgaacatattatggttctggaggctgcccaattctcaaatcattctttgctcaattaaactctgttaaatttgtctaaagtttttcttttaatagctactactactctagagaaatatccacaaagacgtaatgtgtttgttcggaataccttgttgaatggaaagaagggtctgtcctaagggacaattgcaaggattgagacacttggtggcaattttgaggaaaaagcaatttttttttgagatggattcttgctctgtcactcattctggagtgcaatggcgtgatctcggctcactgcagcccctgcctcccaggttccagtgattctcctgcctcagcctcctgggtagctgggattacaggcgcgtgccaccatgcctgagtaatttttgtatttttagtagagacgggattttgccatgttggccaggatggtctcaaacttctgacctcaggtgatccgcccacctccgcctcccaaagtgctaggattacaggcatgagccactgcgcccgactagtaaaatatttttgagtagatggctaaacagcagaaagccctgggaggcaggacggcccagagaaaggatattggttgagctgagtgtcaggcctggggctcggtgttggtgtggatctgggatccagataccaatgactagctgggtgatatcggacatttcctataggtaggactagtattttggtagggttcttttcatttgtaaataacgtcaagaactcaaaataccaagcgtagggcttgatgctccatggatcctccataaagcaagactctttgcttagcttttcattatttcattcatttcagcatttatgtcagtgtgtaaaggatacagcaacctgttgacttagccagcacattttctcagcttagatactggtagttaacagtattatttatctcgtcttgcatgatgtacctctaagaggtttgttcatcaccaccatttcaccacagcccttctccctgttagcttagctggggtttccaaacgtcaatataacagattaaatttctttgttaaatatgaaggtgagtgagctgaagtatgacttgtcccaaaatgtaacaccttatgagacaggcctagaacctaggtcttccataccctttcatgctgcctgagtatctcagtgtggttggcagcctattaaaacacagacataactgattcaactcagggtcacaaatgtacatatcagggaactttgttttatttcgtttggtcatatggatgctgagagaaggtagtgtaaggaccactgcttaccgttctcagctgttctcttcctaagcgcaagtagtgggaccctcacagccctggatgcattgttgtttttttttatctcgaagtaaatgactgaagaatcagcaggagttttccagaatgaaaatgtaataccttggtctgtttggaactcagtcaacaccttaggaatgttctgccaagcttgtttatgttacaaattaaatgtatgtatctttaatatttttgttgttggtattctctcaaaacaagaagataaatgacatttttaatgttttttttgagacagggtcacactgtgttgcccaagctgaagtgccatggtgcaatctcggctcccaggctcaggtgatcctcacgcctcagcctccagagtagctgggacctcgggcgcacaccaccacacccagttaattttttgtatttttggtagagatggggtttcaccatgttgctcaggctggtctcgaactcctgagcttaagtggtttgcccatcttggtctcccaaaggctgggattacaggcatgagccaccgtgcccggccttgttttaccctattttgattcttccatggcttttggaaaatgcactagatttttaattctttgggccactctcagataaaatatcgctgtgtactactattgacatgttaatttgtcttctaacggacaattatatatcccaaagtcatgcctacctaatggtactttaaaaggactaatttgatgatcactgttgaggatgtagaaaggctgtgaccctggcctttcaaacacattctattcaattttgcaaattgagaaggaaagtaagaggagaaagaaaaaaactgctgtaataaaattggaaattgtttcaggaaattgcacgtgctattgagatctttctctgataatttagaaaaggaaatacaaattctattatatattttatattgtacatatatatatttttttttttactggtttattttcagttgaagattaattacatccaggattgtaaattgctcacgggtcattaccagtcacctactgtcttgcagcagagcaggaaatcagatgtgggcgctttaagatgagctggtttagcgttcacttacttaaagatcagtaccaagccgaacccccttgggaggagtcgatggctcatttggccccatggggagggcggtaattaaactctgaaggcagccctgatgttcagctaaaagctggtctttaaatagtaatacactcgccttgtaaagtgctaggccctcgggtggctgttgacacagtgcgaggagctggcgcttttttctataaaagccaaattgaagaaactgttatgaactcatctgcataaagcaatatgattttgcctgagggtgcaggcaatggggagtgattaaccaaccggctctctccccgctcctccgcagctctgctaacatgccacttgtcactaaaaaattggagacaccatatgccaggctgcctctgctgagcgccccttactgatgccacgcgaggaatccctccccaatttggggggctgcgggacactgcgcagtgtctgtctgtagaggaaatgctgcctgcctgccttcgtcttgctccctgcctttctcagcaaggacattccattgttccagggaacgtggcagagacgttctgagtttgcttgaacaatttgaggcacatttgaaggacagtggaagcattgctccagaaacccagtgtccagacatcttgtttcctctcctccctgtgctgaaggctggaagaggtcccctgtggctggttctcatgacctgccttttgattccaccggtgtctttgtacttgtgcaggaaactcaggagggcatgccttcctcctgcaagccttttatttctcctaaaacctactttgcgttctgtctcccgatttttctgtgctccattaattatgcaaacctcttttgattcaatgtgcaaacagtgcattaaggttttaaccttgaggagaatggttttcatgaggcctgacagctgaatcccaggacttggaaaaggagacgactgtgtttggcttttgaagaattagctttcacgtccctccgggtgataggtttgggtgcagagtggcttctgggctgatttgattataagccaccattttgtgtttccctcagtcaccagaattaagatctttctaacagcaggcgtgtaagaagcaagaaaggaaggccgtggtgtgggagtgtggagaaaaatggattctagaaaggttagcaggctgtcttccttgctgctattgtgtctacaccgggggacagtggggtcatgtctgcctctgggctgtcttccccaggatagacagggttggggacagagaggacggtgaggattccccatgaccaaggttgggctgctcttggctctgtcttagttgctctgcttgatgttatgaggggatttggatggggttgacatgggcctcaagaagaaatgcttctcagcccccttgcccccaataactggggggtatcagcctttagaaaggatcctccaggctcccaccccagccccagcccctggagcaaaaccacattctcactaggcctctcctgaaaaggggaagtgtaagacgtgacttcccttagaaagacctgagcttctctttttctatgggttttggggtgaggccagcagtgacttaatcccaataaatattaaatgagacataaatccaactttagcaaatgtcacccacagatttttgctaaatcaaacttatttgtattttatttttttaaatggatgaacttcatctcgaaggaatataaaaaaactgacaaaccaaaggccactgaggtccatgcatggactagggaggaaaaccccatgtatttactgccagatccatgccaggagctgtgcttgggcgaagccatagctggtggcataggtattgtcaccccctactcctcacatggaaactgaggtggctcagaaaagtctacatgatttgcctaaggtcaaaaggcagggaagtggctgttatttgaatccagatctgtcagacccaaagcccatgatctgttggccactttgccgtttgctttgggccagagtctgcctgaggccctggcagagatgtcactgactgggcggtggcccttttccagatacatatccccatgacccaaggaaatgctgctcacagctaccctgagtgtgtggacccccagctctcctgcacagcttcctactgaaaatatctccccatagatgccttgtgaatcattttcccaagaaaaggacttctctacaccttaaccctctttaaaaatgcttgtgtcctaggaggggagaatgtacccgctgagtttcatgcaggggtcttgtcagggaagacagaatgagtgcctatgcactgccaggtcctggtaccagatcacatcatttaagtattacgaccaggttactagggattatttggatcttcttttgtggaggagggaacaaaggctcgccaaggctggaaacccaccaaggtttcccactggtagagaaagcccagactggacctgactttctgttcccaaagcccttgacacgtggccactccagtcactggttttctcagtgacagactggctgggctacacacaagggggctaggggctgaagccactttttgaggtgactctttgttctcccctcattcagtaagtgttggaggctggtgctcggagccatagccagaccattgctggtgccagctcaatgcctgcagtgtgctgggatggtgtgcatatttcacacatcatctcacacaattcttacccctgccaagtgtcccaggacacctgttttagagatgaggaaactgaggttcccagaaagtcagtggcaggtgcaaaggtcatgcctctttgtgtgacttctctgtggtctgtctggtttcccatgacatttctggcttttataaactattaaagcacagactgaaagaaaaagtgggactttgcaggtgaggctgtttaacgtgctggaagagtgaatatatgtaaaatttcggatattacagggctgcctatccccagtggaggttgtctgggcagaaatgatttccctgatttgtgaagattaataaatattttgtaggtccttggtcaactcaggctgctgtcacagaataccatcgtctgggtggcttaaacaacagacattgatttctcaattttaggggctggacatccacaatcaaagcaccagtagatgctgtgtctgctgatgtccatgtggctttcagatggtggccttcttactgtgtccttgtatccctacatggcacagagcagaaggacagaacacaagctctcatgtcttttcataagggcactaatctcattcttgagggcttcatcctcatgacctaatcacctctcaaaagtcctacctcctaataccctcacctactggggtttataatttcgacaaatgaattttggagaaacataaacaataggttcctaaattttgaattctggcgcctattctacctttttttttttttggaaacttttaattaaataaaagtgaatacatgacccagttttcttatttggaaaaaagtgacgcaagttcaatttgactatcaaatgcaaattgaaagataattttcatttggaaaggttcaattgataaatatataacaacaataaaaatggctaaagtacatttcctagggttgtcataacacattaacataaactgtgtggcttaaaaaaattattctcacagttccagaggtgggaagttcaaaatcaaggtgtcagcagggtcgagctctttctgaaagctctagaggaggattatttttgcctcttccagtttctggtggccccaggcattcttcagcattccttggcttgtggccgtatcacttgaatctgtgccttcatcttcgcagggggttcttctctatgtctctgtgtggcctctcctcttcttacgaagacactaattattgggtttagggctcaccctaaattcaggatgatttcatctgaaggtccttaactaattacatctgcaaataccctattttcaaataaggtcacattctgaggttccagaggactttcttaattttggggtgacaccgctcaacttagtacagctgctattcatgtgaagtttccgatgtgacagactcttccaagtgatttgcatatactttgcatagactgcctcccataattcctgttctactccgtgaccaaggcttattcctcaatttctagaaccctgcatggtgagttattttcagcccacctgcctgtattatgaagcttctcccctgccctcctgactcctgctgatgctgcaggaaatttcaccagtgcgatggctcacccctcacttccaggtatcctcttggttaaacccaactcacactgactaagagttcaacttggcacttactgtctatggaacaggcattttcaaagttaaaaagttagcttttgaaagaacagtgaaagaagtgttccccttgggtaggtagatgagacaaataatgaacacaaccgagagcagcaatattttatttacaaatatttttaattatgtaaatttatatgaaataaaacttttaaacaggagattatgaataataatagttgtcatttaatactttcgttgcctggggacagtcctaaaattactaaagtaatgcttggcggctaggtgaccagagactcatgagaagtactaatttgatatccctttagaggtaaaggtggaagactgataccaagtagacagggtttggaggcttcctcaagctgggacttagtttcccttgtagatttgggatccctgcccccccattcctttcctccacagactcactgtggctcccccttcccatgaggtatgaataaaggtgtgaagaagggatgtgtgatttccattcaacctgacattctgcttaatgcattcccctagagggtcgcttgtgataggacatgacctaccccagattctggttctgggtcatgaggccaatgctctgtgacctggctgcccatgtcctcttcatcacttagctaaaggccacctggatgccaaatggtggatcccagtggccatcataacatttcttgtccccatccctataattgattgctggaatcagggaaatggcaggacttcctaggactaaaatgtttaggcctttggggtgttggaggtgaatacatcaggttttaaaaatttatggcatttagacacacactgtcagagggaagaggaatcttacttgtctgacctttccagcctatcaaatattttaaatacttaaacatattttgtatgtgagatgtattctgtattcttttttgaaatgagccagatacattttatttaatgcattgattgtttccccttaaaaatgaatcagataaatatctcaaggagcatatattgtcttcagggaaatgccacacagtgtgatcagcaccaccgcagaggcccgggtgaggggccagtattcagaagaggacacctacctggagctctttcctggggtcgtttctaatattgtgacatgatgctggactaggaagacctggagtctggttaatggtgcaaatatttaataactaggattttaagcactttgctccaagccttcatttccttattgacaaaatgagcaccttagcccattttgggttgcaatcataaagttcaaaagactgggtggcttagaaacagcagacaattattcctcactgttttgggggctggaagtctgagatcaggttgtcagcagatctgtcatctggggaagccttgcttcctgcttcccagacagtgccttctctttgactcctcagatggcagagagcagagctgaagaataagctaactcttgcgtcttttctaagggcactaatccaattcttgagggtcccaccctcacgacctcactaccttccaaaggccccacctcctaatacaatcacagtgggagttaggatttcaacatatgaatttttggggagcacaaactttcagtccatagcaatgagcaattagaacaatttgaaaaccattaatctaacttccacaacatttgagagtagatgctgggcatccaaatgtgtttcttgtgacatcgttacccctaaaaatgttctcttattacagtttcaaattcatgttgaataggtcattcccaacgatatgtatagatagcactgaacattcattttttgagattgagtatttattttttgaaacattctatatattttgaataatcttcttctgaaatcagtcagttagagaacatgtaggcagatagtctcaatgaagaagtggatcaaaaatgccatgtgttttcagaaaacaagtttcttttgttaaaactttgagttcctatttctttttctccatgctcttttgtgtattttgcttggttctttctttgctttcagccactgatctatgcaagtgacattctttttgatcatcaggactgcaagttatcccaaaataatgccttttgttttagaggcgttgccacatctaccaggtccaaaacaaatagaaatttaaatttattccaaatacttgtcttctactactttcagtgcaatacattttgctgaatttggttggatttcttccaagtcttcctaaacatcaatatactgaaaaatcattcttccttaagtataatattattactttattaaagttcattttaatacatgtaatgacatcacaacttgtaaaatgttgaccttaggtcttatatatacttacgcacttatatgcatttatgtgtgtgtatagaccacacacacacacaaatatacacatatatgtgatatattaaacattttaaaattcttgactctgagaaaggcctctattcttttaataaggaaataactttcaatttatgaagtaaactaaaccagaataaatggtacagacaactatttatgaagagcattatgtttaggattcttctcttaaaatacttaaatttaagctttgctgtttattctcgtgtgtttcaaatatgtattatctgatgcttactagcacgcactttattttatttgtaaacttactttccacataggtcttgtttcagagaagcatttaaatatagtctgttactaaaggctggcataaaataagtattgaaatagaggcaattgcagaaagttctggactagttatagtaatgtgaatgcttttttattgaaaatttttatgttatctaatatgcagaaaacaaatgaacaaaaataaaaataacaatggcctgtaaaatgacattcattagtattttgatgtataaaaagacttcccctgtatcaagattatattgatatgcaactggattttcttctaacacttttattgttttatttataacatttagttttgtaatatgcacctgtagtcccagctactcagaaggatgaaagcagggtaatcacttgagctcattaactttgagacatgcctgggccacacagcgaaaccccatctttaaaaaaaaaataccccaaacaaaaaacctttaaaagtaatatatatgggattccttttaataaaatattttctctcagttgttagttggttggctcaatatttgttggtggagtaatggcattaaaaacggattgaagttgatcgaagagggatcagggttgcacagaaaggctgggagggatgggggagctcttttagggcattttggcagaaagcaaaggagatgcgggacccagtagcctaagcagcaccccctctcttttgttcatgtttgtttattaccgatctttttctgatttatatttttaaagctcttatatcctaggaagttttgtttgttgcctccttcactaagcttcctacaatgtggaagaattaaggccatatttagtgacattagaacacaggaagcaaataaaacctgcttctcatcctccagagattcacagcgcagtgtgaggaggggcatggagggacgtagatgtgggtaattaacatcgacagagagattacgctgtgtgtgaaaatagaatctctgagtcctgtgggagcggaggggagagaggaattggttctatctgggaaatcaatggaggcttcttagaggaattgttgtttgatctgaacttttgccttcagaatctagacggaccttaattaatgtttagtgaatggattaatgaatagagtgtttttttgctttctgcttttgggttgtgtgtgcgaaggggaggtgagcgggcatcaaatgtaggaggaacggcccagaagcatgacagttgataattagtcattgtgtgttaagagctcattaattctaataaagatattggagatggatcatacgtgaaaataaagcaccccaaatgcataatgcaactcaatagaaacaaactgctaaaggctatcgacactaacattatagtactatgcaagtaaggacaggttttttggccatatttttccatagcatctaggaaaaaatagaaacgtgaaaatatttgtgagtacatgggaaaatgattttatgttaataaagccattaggtaaaacgagacacaccaggaatgccctgggtcttatctgcatatagagactatgctttcatcttaatgaaggtatctggtccatattttcccttttcaaaaatctcaggaattgtctttttttcaattaataacatcataatatcccttctcatcttataagaaacagagatacacaggaccaacaacaaaaaacatccttgctcttgatctgtccctgattataagtgattttagctgtatttcatttcactgattctgtttgcaaacaggctttcacacttgtttttaagaaataaactccttttctcaaataaaatttcactggaaatcccaatttttcttttttttttctttttcttttttttgagatggagtctcgctctgtcgcccaggctggagtgcagtgacacaatctggggtcactgcaagctctgcctcccgggttcacgccattctcctgcctcagcctctccgagtagctgggactacaggcgcctgccaccatgcccggctaattttttgtatttttagtagagacgacggcgttgcaccatggtctcaatctcctgacctcgtgatccgcccgcctcagcctcccaaagtgctgggattaccagcgtgagccaccgcgcccagccatggaaatcccaatttttctaacaaatctcagcgatgctctggtggacccggtgtggacatctggggtctgggccctctcggcctccccaaccacaagcttgtcccatggagacccctaaagcttgtctgtaaaacatgggactcccttaagtaatcactgggctgtggtcagcgaggttccatcctagtcccaagttttgttctatgaaagtctctgtctgggtttcttttcatcctctaaaggacacgtttttctcttcattttacgagttgattttcctttgtgctgtttcatcctctactacttgacctcatgaaggaaagacggaacccagagaactaggtattgcccttcattgtgtctgagaccccgaataataaattagagcagaaatgtatcattgtctttcttctctcctccttcccctcccttgtgctccatgttccccagtctcatcaagcaattctacctgagaggccttaagatctgatttgaacaccacggccttgatgactttattagcaggcggttcaaggaccacactgggaggaaagaaaaacaaaacacaacagaaaattaaaataaagtaaaataataccattgctccagaattcattgtatggcaaacacagaaagcacaatatcaaggcaaattttgatttcatacttaaaagttgctcgcttttagttttgggccaaattctgcttggtgtcaaaatggggaaaccagaattgttttcaaaagatgaaatatttcccaataataatttaaaacttggacatttcacagctttgtgattgttagaggaaagtacttgggggagtggcgcattttggttgaagccaacagctccgggtcctacaggacagcgtgatgggcctgcttagcttcctgctgtgcttggcgtgctgctgtgcacggggttagctttggattcatacagatgctgtcatctctttcaactggaaatgaaggagcactaacaccccatctcttgatcaaacacgtgacctctgagtggagagggcagaagggctctcaggagtgagtgaccgatgggagagaggctatccccaaattatttggctgtcaagcagacctttacccaactgagtggcccctgctctgcctctgtgtcagacaaacactacatccatccctttactcattctcttgctccactgctcactcactcacctaccacttagcatttattgagcgctctctctgagatccagagatgaattccacctgggtcccacttcagggccctccaaaaccacatggaaggaggaggactacttcatataatgcgaaaggtgcttgggaagcgttggtttgttggggctgctgtaaggaagtacagccagtgacagaaatgtattgtcttacagctctggaggctgcaattctgagatcaaggagtcagcagggctggttccctctgaggctgagagagagtcaattccaggtctctcccagcttctgggagtctttggtgtttggtgatttcatctctgccttcatcatctcagggcattctctctgtgtgtctgtctgtgtccaaatttctcctatttataaagacaccaggcatataggattaaggacccgtcctactctactataattttgttttgtttaattacatctgtgacaaccctatttccaaataaggacagaggtactagggattagtacttaagcatgtgagttttttggtgggggtggggaatataattcctataaaaggtagcattctctcccagtaatttcttcttgaggcattagatgtcacaaataaacaatgttagttttctcagagtttagttactcaagagtgctgtccatttgtggacatgtttgcaagaggagaaggcagcaccgatctatgtcataaatcagcctgctgtctgtctgtctctctctcgacctacctcccttcctcaccacatattgaataaattatactgagtgatatgatatttcagtaggcctccaggaactttgttcagtgaaaagagggtttgataagttgttaaacaataaattaatcaaagtgctcaatgctaagggactttcatgggtatctctgtggcccatgagaatgttctggaaagccagggagagaaaaagatgtttctcaagtcatgagctggagtctgagacctgaaatgggagtagaaaatcctctgccttttcatccggaaagtttggaataagttaggtgttttgcagttctaggagcatttattaaggggcatttcctaagtgaggcagtcctgttctggggatgcacaaggaggcaccatgcctctggccttcaaagctgtcacggctggacttgtttttaaaattcgagagctttaaatcaagttcagaaatcattgccaaaattttctgtgtcctctttacgcatcccaaaactgtatttctgtgtcagccgttatattatgtccttacaaaaattaataagaccaaatcttcaccctgaattagattagaatctaccgggaccgggtgcagtggctcacgcctgtaatccctgcactttgggaggccaaggcgggcggatcacgaggtcaggagatcgagaccatcctggctaacatggtgaaaccctgtctctactaaaaataaaaaaataaaaattagccaggcgtggtggtgggcgcctgtagtcccagctactagggaggctgaggcaggagaatggcgtgaacccgggaggcggagcttgcagtgagccgagatggcgccactgcactccagcctgggggacacagcgagactccgtctcaaaaaaaaaaaaaaaaaaagactctaccggtcagctttggttttcaaaatccattggtagagtattggaaaacctttgaatcttagatggtttcacatcacctctgtaatgacctgacctctaaatataaggtcatattctgaggttcttggggttaggacttcaacataggaatttagggggtcacaactcaacccttaacagtgtcccagtcggcatcacaggaaatcagtttccgcttcttctccaaccataaaatcgaacatgctgatgcccactttcattgtttttcgcacatttgctggctgaatgttggacacttacgtttattaaaggcatgaggttcaccattcagagatgtgatgtaaagtaacgtctcaggctcaacactgcactgcagtgggtgtccttgtaggggcttctttatttgccttgagaattggccacagcacttacctccagcttcttgcctataaatacttctcaaccaagtaggtgtttttttctcccaaatcatgatccatgttgaccttgcaaggagacaaagtcctgctttaaatactttcaggtgtggttggacctagacatctctcactatctttgaaccagttggtcaccttgctccatttaggtgtatctgaggtgccgcgtctctctacagtctcacaaccaccaaccttcagcatgttatgtatttatctgcctgtcattcccacctgactttgagcttctcaagggcaaggattggctcttatccatcctgtctcctctgcacgtagcacagtgcttgctacatatctgatactcaactaataatgtacattaagaaatgagatgaatatatttttgaaaaatgtgcttgcatatctacagttagttgagtctctacagtaggaatgatgctgataatttattttttaacttcgacaaacactgtgactcttacatcctgattggtaaaggctgaatgaaagttaaggaaactaaggcttattgagatacaatgtggcaggcatttgccaggatctgaacacacgccatcacatttaaaccacaccctaactctgtttgcatttttgtctgacattatggttgaggatataagtctagggaaattatttgctcaagttattatatgttataataaggagaaaatgaacattttgtttttagtgcttattcacatgaagcactgttctaagactttaaatatgtattatcttatttaattctcccctacacctttaagatagagagtgtcattgtatccattttaagaatgaggatacttagacacagggaatgtaagtaaatatgcagatcagatagggagcaggtggccagccagcatgaaaacctagtgacttggtatcaaaggttacagtcttaactgtgaccacctcttggggaaccaagtcagacccaggtatgtctatcagaaaagtccatcctcttgccccaagctggaaccccctatttttcttattcactactagatgataccacgtaagtttagagattacagaggtaatattgggagaaatcattacaaccgcccatgatttgatgtcattctgtactttatttctaaatcagaggataattgataatagattaaattaaaataagtaatatagaagattattttggggtaattaccttacataaaattattgagtaacataatagattactttttaaaaatatatcactctatatcattgccctggatagcaagcaagatacctgctcttcaaatgtaaagaatgtttttcaaggcagagctcaagaaatatgttcataaaaatgaacacttggtgataaatgtcatcatcctgcagagtgaagcaagagttctggggacatgcctgtggagtctccaggtccacatcaaggcggggtacacacatggatcaccccaagtctaccctttgtgcaggaagactcccttcagctaccctggagatgtgcacattttctagtcgaatttcctatttttccctttcttacatacaagaggaagtaaaaccttgacttgcttctgaactgtcacaaatgacatttacttttttccctgtggaaactacttgaaataattaatatccaagaatataatctttatgcaactactttactcctagagaaattccaaggttagaaaatgtcaaaaggaatctgaattgattttgccacctggggtcaaattttctattctagttatgaaagtcaattttcataaaaaaatttcacatactctaacctgggaatatcctaatttcaatgaataaaaaacatatggctgcctgtttaaattttgacttttaatgcagaatggtggtatttagcttttaccttctattttataaaattctgttattccataggaataaagtagatgcagatttatcaagtaaattttaaaatatgtggccattttaaaatgagatcatacttgcagcacatcaggtattagtaacagaagatttatttaaaagaaaatcaaatggatttcctttcagggaaaccacttgaagaagctagaatattgagagtgatgacatgttccaatcacctaaataggttttgaagcttcattttcaaacctagatggaggaaggaagagatagaaaaacagagggttagatggaaggatggatggatggatggatgggtggatggatggatagatgggtgggtgggtgggtggatggatggatggatgaatggatggatggatggatggacagatggatgaatggatggatggatggatggacagatggatggagggttggatggatggatggatggatggacagacaggtggatggatggttggatggatggatggatggatggatgaatggatggatgaatggatggatggatggacagatggatggatggatggctggttggatggatggatggatggatggacggacggatggatggacgatgggtggatggatggatagatgtttggatggggaaatagataggtggattcatttcctttaacaatgcttatatgttggttttgtgcatcagatcttgaattaggaaatcagagaaagaaacaattttcacatatatcctggaatatgcaaaatattttgtacatatatagagcaatgaaaaggaaattattcttacatgcattcacacatgcctggattcatcacacacattggcaggaggtaaggatagttttgattatttttaagccaagacaatgaggtagcgtttattctctttacagtatcctgaaacaatcttaggacctacagaatcccttttcactcagattccctgcttttgctgactaactgcaagtgaaacatttttccattgaacttgtaaagttaattcaattaagtgactttattttaacccacgtctgtccaggcttcggatgactgtgccatccctcactgaggctgtcacggtggtccctggggccctgtgaaatgcccaaaagcacatatgcgcacatgcgcgtgcgtgtgcacacacacacacacacacacacacacacacacacacacacagagccttgtggctgttttgaagcaccacccccgccaaagtcctacccagggccattccatttgcaggtttctctaaccccaagttctctcttctccaggtcaccccatgctctctctcccccaggttaccccaggctctcttgctctttcctttgagtctctgtacttatgtcccctcatcaggatgcccttggccatcttatatcagcagcatgcccccatcacccatgatcttctttccctgcttgctttcttgttccggaccactgagctaaagccctcggcaagaactgtctgaacactacatataaatcatgacctgcatgagacatttctgaccacctttcctttatgtttccctatagctttcattaccgctgcacataccccatgcttgcttatttatgtgttgttttttgcttgccttccatgtgtctagaacattcatgttgtctgctcattcagtgaggcatctcagacacctagacttgaagtgattctgtcacaaaatagttcagggaaatcaatctgcaaggaggaaaaagatggatcttttatttatttttttaacttgacgtcagcaactgtcttatctgatatttattagtatttcagattcattgttctttttttgttttccccagtggtttgaattttaaaggaatttctttgtataaagtattttaagcaccctcttttatataaagtattaaatcataacattgatttaaagccatttaatttgtatgaccttttaagcagccgtgagagcataaaagaagagtgtatcaaagcaaaaagtaagaactcttgagtcttttgaaaatatttactttgaacagattgcagctccttaaatgatgaggctttggaatctgggaggtggtcagaccccagctctgcctacttgaggccacccacatgtcgctggacccactgtgtgtcctccccaagcccagcacctcatcttcaaagtgacacccacaatagacagctgtgcagagcattgagtgggatgctggatgcagaacctgccaaatatcactggttgctgatttatcagtttaattgaatttctgctgcaaaagaaggaaaggaatgggggcaagacctgcattttccatgacaagatttgtgttttgatggcagggaatgtgctgcatgccacccacctgtgatgcaaccactcaggaatggggaccaaacctttttgcccatctctcctccttccttaaggctgagctgagagctctgggttggaatttcctgttggaatctgctctgttcttccttcacccttgccctgagcaagctcactgagcagctgcctctctgagccgggagctgggcccagtggtggaaatactgacgtggtccctgcccatcagtctgcagtgcagaggggaaacacacccaaggctactgtgggaccctggggtgtgctgggtgctggagaaggaccgtgcaggagcttgggcatgtggctataagaaaggacaggtaaacggagacaggggtgaatgaagaatgagacaggtgtggtggctggaacggtgtacccagcagagggaacctgatcccagagggtgcataatgcgcctgagaccggcagcagccttggggagagggaggcagattccaggcaaaaggcaagctgcaggtgccagcaggaactgtaaaccaccatgtcctgcaagccttggtggttttggctctgctggtgttgacgagacgccaagaaggagattgtagctggagagagacaatcacgttttcagtgtaaactcttattctgcctgaggtgtggaaaatagtcgtgggaacgaggctgaccaacaccagaagcagggcactccttgtacatagttcagtcgaggggagtctagggaagcctgaatggatggttggatggatggatggatggatggatggatggatggatggatggttgaatggatggatggatggatggatggatggatggatggacaggcagggctgagagatgttatggcaaagaggcatgtagctttgatggacaccacggatgtggacagagtgaagaaaacagggaggatgttgtgactcccttatcgagcgatggggtgggtggtggaaactgtggctctaggaggggcctgaggaaatgtgggtttagggtggagaaagggtggtttggtattccataggtggattctgaagtgtcctgggatttccaagtgagaggaaaactgtctctatagatgagaaaaaatattttcttagagcattttaatgtcaaatagaacttattttaggttatttgtcattttaaattagccaagcacttgagtctttctatagggtggatatgcaattgctcagaattgtcttatcatgacacagaatgggatagagcatttactttcagtgtaaactcagttcaagacaccacctgttatcagagctcccaaaagacaacttgtagacaaccagtcaactgaagggctgaaaattattttttgtgaatatttaaaaactttttttaacctgtagttttgtttatcaacaaaagtcaaattgagaaaagagagcttatcaaatctgtatgtgacttaaacaataaatggagtttcagttcctgggtaagaaaattattctaaaaagaaaaccaaatcaggaggagtcaatggtgtttctttgtactgagtttgtgtctgtcgtacaatgaccatggaatggtgcacttggtttggacaagtcacttctgggggcagtgtggagctacagcagagagcaactgagatgtgagcccagggcaattgtataaggtgttcagttcttattatttcatcatgttaaggcatctcttgaaataaacagcacccttagagttaaagcaatatatctgtgacatagaaattgtttctccaaagtattgctggggtcaatgggaaataagcaacgacaagcctgttcccataaactttattgcctcctgtaactgactttctaagtaaataaaggttcttagttttgcttttcttgcagaaaggaaagaaagagggatacccgagggatagatagccaagagttatgctaattctctgatattttataataaaagagatttcatctaaaaagaaaaggaggttctgaaggtggttatgtacattcttccaaactcaaagtcacgtctggaacattcttatatggaaagagctaaaaatacttaaaaatttaccttgaacatttctcatccaatcatattatggtccaggcaggtgctgatatgagggacatgatggtgcaatatcctttgacaagcagaagggactgtgagtctctgaggatgggatgcagacctttgatctgctccataccaactatgaaggaggtccatgtgcttttgaaacacattgtaaggatccaagactttgcagttaaggttgctcctaataaacacaagctaatagtgcaaatatgattcctgtgcaaaggtaaaactatttaacggccactaagaaacagcaccctgttttgtaatagtaacatgtaaaaccaatggcagatgcatgccagcgcctcttagcactggagagcacagtgatcactgccttactggagaaacttcccagaggggagtgccatggaatgctttgaggaagaggaggggctaaaaatggaaagcctaggccagaagcagtggcttatgtctgtaattttgggaggctgaggagggcggatcacgaggtcaggagatcgagaccatcctggctaatacagtgaaatcccatctctactaaaaatacaaaaaaattagccgggggtggtggcacgcgcctgtagtcccagctactcaggaggctgaggcaggagaattgattgaacccaggaggcagaggttgcagtgagccgagattgcaccactgcactccagcctgggcgacagagtgagactccatctcaaaaaaaaaaaaaaaaaaaaaaagtggaaagcctggacattgccaaagacaaaatgtgtctttcatcctgtccatgaggaggctctgactgctgctcacctcgctggctgctgctctgtcttttatcctctaggattctgaaagcagagacaatgacttagcaggtgagttactgaggccaactgagcaaaaacaaaggacagatggagtacctggcagtggaggagtagggacgtataaagccatccctcaaggcttgtgaccttaaggaatagaccagttagttagaaagacaagatgcacttgtacaaaatttaccaacagtatgagactatggtgctagcaaatgtcacagacatgacgattgaagtagaagaaattcttggctcaaggaagagcaatatccagtatttactggaaggaatattttaaattagtgctgttctagaaaattcagggcaatggctatgcattattctatttataaaacatttctacacactctatgtataataatgtataacaaaataacaggccagtaattactataatggagtataatatagtatattatgagaactggaggccaagttctcagaggaagccactttattccttaagttaatatgatgaatctcgctttgtgtctcttatgccttatttgagccacacagaggaggaaagaggagaatcccaacacatagtagattcttgaatttcaccattaaatatgggtcaggactgtggctatggctgtgcttatgtcatggagagctttgtgaaattaaatcaatgatgatttatgaagtcatcatcagaacatggtagaaatactatggttttgggcactgaaccaccccagtgttgaaaggtttgctttttggctttgaggtttaaaaaggagctgtgatattttgagacacagagatgatggatggcagccagaccaggttaccttacatggcagaactcctggagatgactagtggcatgattagagcatccgctcctgtttccacagctatgaggcgggtggtcttcagataaaaggagagccgcatacagggtttctgtctcaggatttcacccacggttcttcctccagaggcaagggtgagcttcatgtttcctttgcaccagtagcaatgacagcagaaacaggcactgcaatataattatactggatttattccagggtgtatctgttatttattactgtataacaaactacttcaaaacttagtggcttagaacaatggctatttgtctagttcatgattgtgtgaactggcaatttaggctgagctcagttgggtggttcttctgctgtcagctaggttcagtcatgagtttatgagcagctgcctgtcagagaggtggctcttctcctggggttggttgccagctatgtgttaggaagataaggagaactggatcattgtttcctgttgtccagcaggcaaccctagactacctcacatggtagctcagtaggtttcagagagagagtgtgcagaagcttagactcagtgctggtacacagcaacttctttcacattctgtgggccaatgtgaaatacaaagatgccccatgtggctagagtggagaagaagactatgggacttgataggaggagttgtgaagatcattgtaaaggctatgatacttggagacatggaggattatggctatttttggcatctaccatacatggggtagattttgtctgaaggcagtgtggctggaagcatttaggaagtgagagcttcacctgtatgtccatatagggacactatcaggaataggaaggtcagagaaaaatggagcttaacagagcaaatgccctaaagagacacagaggccagagccacctgcttggaaagatcagagggatggaacagcagggcagggactttaagccacaccaggcagtgcaaatgctgctaactttgcaggggctcaggaacacaggccagggaagcaccttgacctcctggctccaaagctctgagcatcattcttagaaatagctcccctgccagcatattttgtaccactgagaaagtgactcaggatcaaatccagagctctgttttttttttcttaattaactaattgattttgacaaataaaagtgctctgtatttaaattatataacacaatgttttgatatatgtatatactgtgaactgagtgccacaatcaagctaactaatgtattcaggcctctgttgaagtgccctaatggttctcttcaaactgctgcaaaaatctgataagcaaagttcctggccagcccgaagttacctcgagggctctcattatctccctgaatcccaccccccggcctcacctaccatgccatctctcaccccatcctcttttggcagatgtccttgtcttctacacacctgaaaaggggaaggcatccagtttcatattctcattgcagcacctgtgtcagttaaggcttggatggagccctctgagtagccttcacccccttctccctgaataagccaaataaaagtgggtttcatttgagggagtgacatgtccctgaaaggcttggccttgtggtaagtcacaaacaaggcatgaacaatattcccaccttctcctctctgctaagtacttgccctgaaaaaaactaagttctgcaaagtgctcagagggtttaggtgtgaaccacccagctggaggcagagttatagctctgcctctgggggccagctccagctgggaggttgatgggagcctctgacgctgggctccccgagaagcaagatcctagacaagaatttgagtgtaaggaacttctttcagaggcaggcccagaaagtatcctaggaaattggggaacggacatgggaaagaaaagaagtcagtagagagggtgttgtccagcagtttattggtgtgggaaactggggttcagtcccacctggggcccccgagagatttggtacagtacacttcaaatgatcatgtctgagataccaggagcccaccttatctatggctgaggtctgttcatgctctgtcttgtttgctggccaagagaaggttctcagatggaaggccacaggggttttcagtaggagccctcttggctgagactgaaatgagggtacctcaaaacattaagtgaattttctgagaccatatagctgggagctgagtctgtctaattttaaagtccttgttctttaacaggagaaaagagaaaatggtgacaaataagtagtttcttggatccaagacattgagagtggctatttcctccttgcacagaaggcttcttgatggaaaccaaattactctgaaaagttactagttttaatatcttagcaaatcatttgatacattcacggaagtgtttatcagcaatgtataattgttcttctcacttaaagaatgtttgtttcatgacattggagatctgtaacacaaagacccactttgtatgatgaacccccgtggtgtagctgcttacagggccctcacacacactcttttggtccctgaccacatctgttttaacctggttctgactataccactgtccactgctagacagaaaagaggaagacatgcctcattctccaaaaactggaggaatggcatcattttcaagtttagtttttgttgtttccaagtatatttatgtaatgctgtattatatgtatatacttgccatgaattaaatacgtcacaaataaaatccacttttgggactcaacagtatgtaaaaacacaagtagtatgaacagatttatttataaagttatgatgagcctttctgaaatctttctagcatatcactggtgtaaatgtcatgggaattgaaaataatgtatttgaatttcacagtcttctgtgaatggattttttttttttttttttttttgagactgagtctcactctgttgcccaggctggaatgcagtggcatgaccttggctcactgcaacctccacctcccgggttcaagcaattctcctgcctcagtctcctgagtagctgggattataggtgcatgccaccacgcctggctaatttttgtattttttagtagagacagggtttcaccatgttggtcaggcttgtcttgaactcctgacctcatgatccgcccacctcgtcctcccaaaatgctgggattacagctatgagccaccacacctggccctgtgaattttttaatactgcatttcccaaaaagaatttgtctttctctactttttaaaaaaagttttccctgagtctattataaagtcattcttgaccagaaaactcaagcaaaaaaagaatgaattagttgacttgtccagattctatgtttagcagacatgtgtaccaagagtttgtattgattgttaatacatgataacacagaaagcgctgaaaaatcttaactctatgtaaagtgtttatatatgtatataagcacttaagattttatgtaatataactttttctattcaaccttttaaggaatatctaatattttaaattactttatcaagcaaagaaaaaggacaagtttaaaaataaaaacatagaaaaggaaaaaaaagagaattatcctgtggtgttctctcattaacgaaaaataaaggtttcggaaaatctgttaattttccaaattttagatttttatgtgctattagattggaaaatgacagattaaaattttgaaaaatttgttcatgaaaattctaactttaagttgctcatgatctaaattttcttagctctcatgagatctggttgtttaaaataaataaataaataaattttcttaaggacccaactgccactaagattgtttaaatggtagctactggcattttttgttataagccgaatttctttcatcaaatcaagctcacacattcactcaagttcttaagatactgttgaaatgggaaaagtccctttgtccccctctcagggtgtgtgatgggggtgtggctcgtgttttcggtgcctcactgctcaaactttcaggagagggcatacagacaggcaggctgtggtgactccgaccccatggcagcgtctagaggtgaatgtttacagctcctgaggccccagtgtgtgtgtgtgtgtgtgtttgtgtgttactgtgtgctctattggtttagcatgtgcaggtggcttgtgcgtatcagatcaattagactcctgccttatcacaaagacagagggcttttctgtatcccaggatttcttgctttgctgtaccagaagaatcagatcacacctgggcttggagaatgagtgcaaggttttgttgagtggaagaagctctcagcagatgggggagccagaagggagatggagtggtaaggtggttttcccctggagttgggccgctcagccaccagggctctcctccctctgcctccccgaaactctgcggcattcaccggtcaatggcctgctggcctgctggcttctgtcggtgtgctcttaggccggtgcattcctcccgaagtccagccacttgtgtctttttccactgatgtgttcctctcaacatccagctgcttgtgtgcgtgcccgctagagtctcggggtttttataggcacaggatgggggcatggcaggccagggtggtcttgggaattgcaatatttgggcacaaaaacagaaatgtctgccttcacctaggtccgtgggcacaggcctgggagtagagccctagtcagggaccacaacctcctctacccaacacttccctgcccgcttctgtatcactattccttcattaattagaaagtatgcattttttaaaattatgaagtgtctaggtgtctgccagcattactcaataggaaactccaatagaggagtaaagttatttctccaaggtcaacaaaattaataaatacaaagccttcatcaccagagccgtggtgaagagctctttgcactatgtgtaagcgaaacatgaaatcaacaatttatttaccttcagtgtaaattgttcattgaatgtcattatgttgtcgattattgattcctaccgcatgtgacaattacatgtgcttctgccttccctgccctgagtaccaggctgctttcaactctgggcagcaaggtggcaagatagagttgatggagttgcgaatggaaacaggaagatttggcatctgaatctcgaaaactcttgacgaaaattctctttagatacagagatttgataacttcttaaagcgaagtttgttttgctcatgacgatcacacctatcagctgatcaattctgtttccctttcaaggaaaaaaatatgtatcctgcatcagcaaggattcatgaactaaaggactcacagagtagaactctccacttttgaaactgaggagccaaggcccaaagagaaaacgtgacctagatttagtcattatttattgttttaaaggggggacaatcaaattaatgaaggcagttaaaaatacattgcattcttattaaatacattttgtaggatttatgcctgatgatcatgaacatcaaatctgactttcctgttgagcaaaatgaactataatcaagtggaacgaattgctttgctattatcccttgttgtggatttgtgtcagcacatggtaactgagctgaaatgggctttgtttgcttagctcttctcctaaggagaacaacaccatttactctgagtttgtactgggtttctgtctactaactgcttatattggccttactttaataaagatttctatctcactccttaatacggcacatgccaatgggaaacacataccttatgcctagctttgtcctatagcagagtttctcaacctcaacccattgacattttgggcaaaataattctttttctcggggagggagtggcgaactgtcctatgcatttttaaatatattttttaaaaagtttaattgacacacaattattgtacctatttatggggcacaacgtaatgttttgaaacgtgtatacgttgtttaatgatcaaatcaggataattagcatatccatcacctcagacatttatcatttctttctggggaacatacaaaatcctctatgacagctattttgagatgtgcgtaccttgttgttgactgtagttgccagactgtgcaacagaacgccagcacttctcctttctcatcgttaactttgtacccattgaccctccactccccatctccctattcctactccttaccccattctattcactatttttataagattgactttagatttcacatatgagtgaaaacgtggtatttgaggggttaatattcagaatacataaggaactcaaacaggtcaacagcaaaaagacagcaaaaaaaattaaaaagaagatatacaaatggacaacaggtatatgaaaacattctcagcatcactaatcatcagataaatgcaaatccaaaccacaatgaggtatcacctcacttcagttagaatggctattatccaaaagacataataagataacaagggttgctgaggatgtggagaaaggaaacccttacacactgtgggtgggaataaaaattagtaaagccattacggaaaaaagtatagcggtttctcaaaaaactaaaagtggacctaccatatgatccagtactttcactcctgagtgtacatccaaaggaaatgtcctgtgtattttaagatgtttagcattatccctggcctccacccactagatgtcagtaccacccaccctctcactcccagttgtgacaacaaagaatgtctccaggcattaccaaatgtcatcagaaggtcaaaaatgaccccggttgagaaacactgttctacatacagtagggattcttgaattattgtaaaacacagaaagagtgcttttaagttgtttgaaattttattttattagaatctatgaaagtatttttaaatttttagcaatacataatatttgtacatacttacagggtacatgtgatatttttaagcaaacaagcaaaggccatttaagctcaattctcatgtgctaactcaaatacaatgatttgcaattccttatatacacactacatcacactacatatattttctatttatttatttatttttagagagagagagtcttgttctgtcacccaggctggagtgcagtggcacaatctcggctcactgcaacctccaccttccaggttcaagcgattctcctgcctcagcctcctgagtagctgggactacaggcacacaccaccatgcccggctaatttttttatttttaatagagatggggtttcaccatgttggccaggctggtctcgaactcctgatctcgtgatctgcccgcctcggcctcccaaagtgctgggattacaggtgtgagccaccgtgcccggccacacactacataacttttcatccattctcacgttagtgtttgtgttttatttcctcctcaagaatctataaaatataaaaatatttaatgcatttaaattgttgacagcaatctttgattttgaaatactttcatgaaaagcatattttctggaagataatagcattgcattgaatcctgctcctcttaactgacttgctataattattgcagagaattattttctcttgaagaaagatggtatttaaagtaaggtataactactgacctgtgtgcctctagaatgagagcaagtaagtataccaccaaaattcaactggaagtttgtagttttatggctcctagaatttattctaggagcaatttattccactattgcaagctaatctacttcacatataatttagggcaaatgaattatgtcattaaggaaacatattcatttagagttgttaaatgccttctaatagatgcaagatctgaaataatataaatatgtgcttatattaagagtcaggggcaacaaattttagagtctagaatgttataagaaggaaggtcatgtgttttatgatttgatttaaactaccctagtgattcaagttacctagaaccaataatcaacagggtattttatatgtgtatggacacacacacacacgcatacacacacacagagagagagagagagtgagagagacagagacttaaagaaattggcccacacaattgtcgagctggcatgtctgtaatctgtagggcaaagcaagaggctggaagctcaagaatgatttctatttttatgttatggtcttgagtcacaatttctcctctgggtgtcttagtctatttgggctgtcacagcaaaaataccataaactgggtggcttgtaaacaatagaaatttcttcctcacactactggaggctgaaaaatccaagaataaggcaccagcacatccagtatctgttgaggacccactccctggttcatagacagcgccttcttgctttatcctcagatggccaaaggggcaaggggtctctctcaggtgtcttttaagagtgcacaataccgttcatgagggctctcaaatccccacctcctaataccattaccttgtgggtaagaatttcaacacaaattttgggcagatacaataattcagaccatagcactgagactttttttcataaggttctcaattgactggattgtagatgttaaccatatctacaaaacaccttcacagcaatacccagattcgtgtttgatgaaataactgggtattattacagcctagccaagctcacacataacactcaccgtcatatatttacacatgcctaggaagagtaaaataaagggctatctggacattttcttgaattaccagattcataaatacagttatgtaccacatagtgacatttcagtcaacatcggactacatgtatgacagtagtcccataagattataataccgcattttattgtaccacttttatgcttggtatatttagaaatgaagtacttaacattatgttccaattacctacaatatttatgcagtaacatgctgtatgggttagtagcttaggagcaataggctacacagtaaagcctaggtgtgtagtaggttatgccatctaggtttgcattaagcacactctgtggtgtttgcatgataatgaaattgcctaatgacatacttatcagaacatatcccactgttaagccatgcacagttgtatcatgatggatggatgttcttcctataactcaatgaagtaaaattttaaggttttaggtggtgtgtgtgtatatatatatacatatatatacatacacacacatacacatatatatacacatatatacatgtatatatgtgtgtgtatgtatatatatgtgtgtgtatgtatatatgtgtgtgtgtatatgtgtgtgtatgtatatatgtgtgtgtgtatatgtgtgtgtacatatatatatataaaatatatattatatatattatatatataatatataatatatatataaaatatatattatatatattatatataatatataatatatataatttatataatatatataatatatataatatatattacataatatatataatatattatatatatattatatatatatatgggcaaactgcattgaaaatatgtgcagatggtctgcgaggctctttgacagactggctgccacatgtcagcagatgactgggcttgtgcctcacccagcaagacaggacgcatctcaggccttcagggtctcttgcaaatggtcagaactcaagggtccattggaatgcacacacagattcctattgaattggaatatcggctattcactctgtgtttaggaatactcagtatcgaggttcactaatacccatcatggaggttctatgtgccctccttggtcccctgtgtccctggacccaaggtgtgcccaccctctgcatgaagcacccatgtctctgtgaaccaagagtctgcagaggccagaaaagcatgggacccagaggttggcatttgggctaaagctcatactcagagccatgtgcagggccaaacaggtgatgaaaaatgagagcactgggctggacccaggctgaactcaggaacaggcagcagcaacaaatttccagtaatgagagtctgccagggacacagcactgtcactttcctcctgccacctcaagagttaagcctagggacagctgcaggtctcagtgcccacagcagcaccccagaactacattccaaagaggggatcagagaggaagcactttggttttttacacagctcctatttatgtgttcttatgacatgcactgtcctgttttcatggttttgttgaagttccaggtagaatgggctaaatgcacattaagactgaaaacagaatgttaaatggcatcatagacatattagaaaaggagggcttagagattacctgagtcaaccttgtgtgaaaactgagaaaaatgagaccctaacaatgttatatggtaggctgcaaaggctggctttgggtcccagaagaaaatatgcgtgtctgtgtgtgtgtgtgtgtgtgtgtgtgtgtgtgttgcttgtgtgtgtgtatagatgtgtgtatgtgggtatatgtgtgtgtgtatatatatatgtatatacagagagagtatataaggtgaatatgtacatttgcatttatatataaatatataaatacacaaatataaatatataaggtatatatatacacacataaggtgtgtgtgtggatgcatatatatgtgtgcatatatatgtatatgcagagagagcgtatatgaggtgaataggtacatttgtatttatatgtaaatatataaggtatatatatatacacataaggtatgtgtgggggtatatatgtgagtgcatatatatgtaacatatgtatatatatacacagagtatataaggtatatatatatatacatatgttagtatgtaaggtatatatatggtgtatatatatgtatatatataatatatgtatatttacagagagtaaggtgaatatgtatatataaatatataaggtatatgtgtgtgtgtgtatatatatatatatatatggtgtgtgtgtgcgcatgtgtgtgtatccggatttgctactgtctaatgaataaacaagatccagatttgaaacacaatagtgtatatgaatgttatcagaaaaagcccatcaaatttctcccacactggggcactgcagagtccttcccttctcgaatgttctccctggcacttgtgtttctctccttcctgacctctgcctagtcgcagatagagatgcattttgacagaaccgggaagagttgttctatttccatggcaacgtcaattcacattctgcaggtacattggccgccactgcctaaatgaaggctcctcaaggctctgtgtgttgccgtgcctggccaaaaataactgggcatgccaccgttcctcacagccccatggagagaggcattaaactgactggatgccaactgtcaactctgttcctgtcttcctgctaaagaggaagaaacaggaactgccagtgttttgggggaggggagccagggaggctgctacattgtttccatggtctgagaaacatcgcatttcctctgttgaatggaacatgaaatacattcttacttgttcaccccaggggcaccagataatttgtatttcagcagaagtattataattacatagtttagagttagaattaattagcatttggggaagtagtgataaaaccaagcagttattaaaaaaattaattttaatagaggtcagtttggagagagtgcttggttttcttttgaaagatttgtgtgtgtgtgtgtgtatggtgggggagataaaagaataaaattattaaatgatcctttaatcagtctgaaatgtgaactaccttatcattagacgctaccactggatgttaaaatccaaattagtggcacacatgcagaacatatttcaaaattagtcaagagttaggtgaatctttgagggttatctatgaaaaaaaaagaaagttttgtagagtcctttaaaaagtatatcatgttcccaagaatgtgggtcataacaaccttcttgacgttaaacatagtcaagaatgatttcatgtattatactagacacatgagatacttcataataattaaatattgtttgaagaataatttttgaaatcagttaacattgcctacgagtgcgctgagtgtgaagctctcctgggagggcttgtgcacccgggaataaagttgaatctttgccctcatgaggcttttactttgttttgagtgaggagtcagaaaagactgcaatttttaagagtatttttaccttcaattggagttttacaacactcctctaagttcttaaaatcaaagaccatcacagttaaattttaatttttttctgaaattgatcaccgttccgtggttgtataaaagactgtccttgttctcagaagataatgttgaaacctttggggagaaagagacatcatgtatgcagtttactctccaattgttcagcagtaacaataagtgttttcattagaatgagagaaagggaaagcagtggagaaaatgaggcaacttgttatcaagtggtgagtggaagtggaaggtatgctacagttactgtactattcgtataactgttccttcgtttatatatttttttcaaaacaataagttaatgtagtctatagctttaggcaaaaactctttttcaaggaaaaggagcagtgtgcaaaagttatttttattttttcttaaatgaattcgcagtctttttgaaaatctggaacgtcaacacttgtaaatgtatacttctttagttttcagattatagtaggaattaccctactaatattctgaaataagaagtagcctttactgatgtaccaatatttttaagcagtgccagtttctaagtaatcttttcttaacttcgcttctgaaaatttgaaaaatgtcctttcgtcacaagctataggctgcattagtttagcttttccttttccttccaagacaacacccttgccgcagtttggggccagaatgatcagctgacccattccacatctttatactctaaatcaaagttgttccctttaaagagctcattggagaggaatatgtgggatttgataagctccgttgatggtttaataattatgaatgtttaacagacattatacatttatcccacatttactagtataagagcgaaaataaggaatgaaagcaaattgttctgcagggtccatttgtgcatgctattatgccccataaagaaaaaaaatctttcataaaggatcgttagttttttcatcttatttacaccattagatgttgctgcagaacattagaatatgcactggtgcaacgtgaatagtctgtctgctatttattgcataatccattttatgcaatgtcaaaaaggaaaacaaccaaaaatacagggtttattttaaattaggagttaagctctgactttctgatgtgctaagttgaagcctggagcattttctcgctaatccagtgtgagtttctaacagtgagccctgttttaagaggaaaaagggtgatgtagtccaattaataagatggccttgttcattttccctgggatgatgaagcattggatggctccctggctcagtgaaaacagggtggaaaaacgttgatccaggaattgtaaattgagcatgcagggctctgcaacagctttcctatacttctttgggaataaggagtagggttcaccatacctgtccagttttctttgcacttgccactgtttctcttaaattgttttgggaggttgctttcattttggcacatttttgacgaaaaatgtgtgccttcaagttcatgcccaggttgtctgtcctgatcacacaaatggccttggaggttccttatgaattctgtatgcaatctgtcactgcattgcttatgtagcagttttgagtgcaaagccttgaaaattaatgaagtgcctttctgttttctgtcccaatctgtgatctggtgcctggagggtattttgactatttttgacttcacttgtttttgttgttgttgttgttgttacatacagtttttttatttttaaattctctctctaatatgttattttgcttttattctgtccattcattcaacaccatgttgacatagtttggatatttgtccctacaaatctcatattgaaatttggcccctaatgttgaaggtggggcatagtggaaggtgtttgggtcatggggaaagattcctcatgtatagcttggtgccgtccctgtgataatgagcgagttctttttctactagtttatgcaagagctggctatttaagagagcctgacacttcctgccatcactcttgctccttctctggttgggtgacccacctgctcccttttcaccttccaccatgatttgaagctccctgaggcactcaccagaagcagatgttggtgccatgcttcttgtacaacctacagaaccataagccaaatcaatcttttctttgtaaattatccagcctcatgtattcccttacagcagcaccaaacagactaagacatatatgcatagttgtgttcttagattttgttgttgttgttcccaagatagattttcctttctttttttcttttctgttctccatgtctcttcattcatattacagatgaggcacaggacctgggctgaagtatgtacggggtaggtaggttatgttctctcctctttctatgcagtcgatgtaagaatcccagcactttgggaggccaaggcgggcggattacccgaggtcgggagttcaagaccagcctgaccaacatggagaaacaccgtctctactaaaaatacaacaaattagcagggcgtggtggcacgtgcctgtaataccagctacacgggaggctgaggtaggagaatcgcttgaatacgggaggcggaggttgcggtgagcagagattgcaccattgcactccagcctgggcaacaagagtgaaactctgtctcaaaaaataaataaataaataaaaataaaaattagtggaggaaatgggcaagcgtcgaagctgagaattttctatggtcccttccctcccctgcagttctgggaatggccactagggacgcagttgtgccgttaatgggtctcgggggaggccttgcccaggtgtgaacgagggaggtcagagcactgttactcttatggcgcataactatacagtactataactttactatgataacttcactgagcaacggtacaaatcgacaaatggacaacagtttctatcattgattaatcaaataatcagaagtcaataatctgctaagaatattctgacctctactggcccttggcaatagatggagacagaacaatgccgcaaacgtgaagacagcctcccactctctcctctcccacttctcctacaggctttgaggatcaccacgtttcgctccttcattcacatgtctctgacattttagagtccagaacatcacaagatacccataatttccaatgacgtgaagtaatagagataagatttagtaggagagtaaacctacctctgtccttgctgttgtatccccagtgtgcagtggggtgacttcccagagtaggtgtgaagtcagtgtttgtggaataacagatatgaaagaaaatagactcagttttgtaagaaagaacaaggttcactcaggataagatgggcaagggaatttcttcttatgtgtaatcgctgaatcatgcataattggaagggaaagatcactgctacgttaatttcctcctgcaaacacacacactctcttcttgcaaaacagtgtaacctatctcccttgcctttctcattggagaaagctttttgcatgcaagtgtttcccccaaaagcaagacctcaaatagaatacttttttttttttttttttttgagacagagtctcactctgtcgcccaggctggagtgcagtggcgcgatctcggctcactgcaagctccagctcccggattcgcgccattctcctgcctcagcctccctagtagctgggactacaggcgcctgccaccacgcccggctaattttttgtatttttaatagagacggggtttcactgggttagccagaatggtctcgatctcctgacctcatgatccacccgcctcggcctcccaaagtgctgggattacaggcgtgagccaccgcgcccggccgagaatactttttgtaggttggtgaaagagtgacttatgtataggcagaggtgcaaagagagtgttttactggaagtgcagggttgtaactttactctataaagaattataaaatttgtagactcatgaatattagaactgaaaacaacattagtgattctagtttcatcttttccatgtttgtagtcaaggaaaccttttctttggagaaatgataaagttaaccacaatcacattcattttgaatatttttgttattaagtaacatatgctaaatttatgacatttgttttcaataagagctgtgacatggatactctaatcaagaaattaatgtaataacttacattaagctgaatttcttgtatttaaaattttatctatatgtgaatatatttttaatgtcactttttatcagccctgttaacttgagggctgtggcaaaattcctatttctttatctataaaataaggatagtatcatatctgttctgctttcctcttttctcaaaagtaactgagaaaatgtgaaagcattttatgaactataaagcaacataccatgaagagaattaaacaaatgaatataattttattattctcccaaataaatccaacctttattattaacacatatgtgaacagtgcaaaaacaagtctgatacattttttaaaggtcaggaattttgtagaatttttaaactataaaagaaacatgacatgattttctcaaacataaatttcttgcttttattctaatacgtaaataagcacaatactgataacctatgggtcagatctggcaggcttccaaattaacccatctggcagaagtcttgtgattcatggcaacatgcggtccctgggtagggtcttatcaggagttctccaattgttggcatactgtttactatgtaacttacagacactgaaaaggatcctgatttgtttcagaatgggaagaaagtctggctgatggtcttgcacatggacactttaacctgtatgttgccatctgtagccaatgattgtaacttctgtaatgtaccctccaatgaaaaaggacagctctggtgtgaggagttctcttccttctaaactttcttatagaggccttccaactcctagctgactctggaacacacccaacttctgttgacttcctgagtcaatcttcacatttagttttcaataaacctttgtcaatcgtcacgtttgatttcgaacaaatgtttatcaaaccattatcaaacctcaacagtcttaattttggtcaacaatactaacattttgagcaacttattatttaaaaattgatgtatattaattcctaaaaggtggacttattacaatgtaacaaccagtcatatctaaaatgccactagaaaattcctcataaaaatgctatctctgttgaattaataaattttcccttcaatttcatagtcttttttttagaagcctagcctatatagtgtttatttctatattggacctggctatactcattagtgattttatagtgctttctttgttatttattttagagtgctttggggggggacaattttagattctttttttatgagatggagtctcgctctgtcaccaggctggagtgcagtggggcgatctcagctgactgcaaacctgtgcctcctgggttcaagtgattctcctgcctcagcctcctgagtagctgggactacagttgtgtgccaccacgcctggctaattttttgtatatttagtagagacggggtttcactgtgttagccaggatgatctccatctcttgaactcgtgatccgcctgcctcggcctcccaaaatgctgggattatagccatgagccacctcacccagcctagattcttttagagaaagatcaaagcatgtgtaataaagtttgctttctgttctagttttgtttggtttcagaatgcatgtataaaatttttataacttcacagagtaggatggcattgtgcttgggcctcgttcctgttttttaatgtgattacatatgagttctttcatagaaattttactagctagtggtcactgtgtgtgaaatgctgcttattgactgggtccatgtctgtgtctggttttcctcatcattctgaacccactgcatattggcatttgccagtggggtgaaagtactgtacaggccttttggaaaaccaggctcaggccccaggctctgagtgagaggaacaatggggagctgtcatcccctcacctcctcccagtgaaaaatagaaaatcaaatctcctttggccacttggcaaggatctagccgttatttctccagtgtaaaagaaaagggtcttggaaaaagaccctttgctaatcaatatacgagtaggaaagattagagaggtttgacatcttgggcattaggattcactgcctgaactccttttgaattctactttgttttattttcttggaatttatggctgcaaatgactgtgctcttggaaactgagggcctgatgaaagttcttcccttgcttgtgtaacaagtgacactcacggactgacatcaacttccaaaaatatgcagaattttagagaaaaaaaccaactgcacaagttgcaattttgtacaaagaggaaacaacaataactttgtgttttaggtattagggagctcatccatgttcaggccattttaccaaatttaaaatttttaataaccaaaattttaccttagaaatgtagcattttgccatcattccttttgtcaaaatgttgtttttctggctggacacaatggctcatgcctgtaatcccagcactttgggaggctaggcaggaggattacttgaggccagaagtttgagaccagcctgggcaacataaagagaccttgtctctataaaaaagtaaaaaaaaaaaaaaaaaaaaaaaaaaatatatatatatatatatatatatatatatatatatatatatatatatatttgccgggtgtggtggtttgcacctgtggtctgagtgactcaagaggctgaggtaggtggttcccttgagcccaggagtttgaggctactgagagcgatgactgcaccgctgcattccagtctggtcgacagggcaagactctatctttaaataataataatgatgataacaacaacagcaatactaattttaaaatgttgtttgtctccatatttaaatgccaaactgtttagttaacatttttaatttgatttcaattaacctatgcttgggatctttttaccattacaatttgcatttgaaatacataatagagttattctaataatccaaaaacagacttttgagatcttttcccttctctttttgatttataaatagcatattgattcccatttaaagtgtgggtgcagtgtggctgtcagcatattccattttagtaatttcattattgatttatttcttttctaaaagttacaaaagcaatggtgatttgctttcgcaaatagaagtgactcagaatggtaaatactcacagttcatggtttcttccctgcctgacagtgtgagtcagaaattaaataaatcagtgttgaaattcctagaatggaatctgctgggacccacactgcgtccatactccatccccttctctacaaccagattaaacatactctctccatgtagggtggctccacttaggaaaataaaagtgactcaactgtacccatttttccacaggtacatttagcaaataccggtgggttttggttacaaaggtccagggattggtgctctaggagagcagttcaggaaaagggtctgtatgcaggagtggaggggcgagggggtacagagaaagctgctctgtgataggctgtccagagggcagctccaacagtctcctgtgaatgtaagttatttttatttatacatttatttttttgagacagagtcttgctgtgctctgtcacccaggctgtagtgcagtggcatgatcactgcaacctccaccttccaggctcaagagatcctcctgcctcagcctcccgagtagctgggactacaggtgcacaacaccgtgcccagctaacttttgtgttttttgtagagaggggtttcaccatgttccccaggctggtctcaaactcctgagctcgagtgatccgcccacctcagcctcctaaagtgcagagattacaggtgtgagtcaccacatccagctgtagatgcaagttatattcacaaatgtaagatggacattagagtacgtgatttgcctgctatagaaatacagcagtgtgtatgtaaagttgtaaatgccgtattttttacccgtaagacaaatagaagagctatatgctttaatgatgcataggactattttctgaaatctgctactggtgttgaatagttgcggctgtttttttaaatttatttttattattattatttttgagatgtattctagctctgccacccaggctggagtacagtgacgtgatctcggctcactgcaacctctgcctccagggtttaagcaattctcctgcctcagcttcccgagtagctgggattacaggtgtgtgccaccatgcctggctaatttttgtatttttagtagagatgggttttcaccatgttggtcaggctggtctctaactcctcaccttgcgatctgcctgcctcggcctcccacagtgctgggattacaggcgtgagccgctgggcctggccaagttgtggctgttattttaacatagaaagtttttttccaatcaaagtgtaacttctctgataatatgctttgtatttgtgatttatgttttagtaatagtagggcaaaatatttttttcctcttttgattaccactagaccaatattttttgtattatatttaaagttgatattttggtaacacaataagataaaatatatctttttccctttataaccaccaatctgatgtttccaatgtaacagttttaaaaacgcttcttcctggatatacctagtgattcctgaattctcttactgcagcctaacgactgttactcgctctttgctttaaataatcttgacacatagtcctcatcacagatccacattttctttggccatatatacaaactcgacagtgtggtgttggaaatgtgaaagggctgctaactctcctgaatctggggtcactggttatcaaataccatttaagcactttatatctgaattaagccgattttgtttgagccacttgatttttccaatgaagcaagaaggagcaaataagtggtaaaaacaaccttggcttgttttacttttcctccgtgaagtcagtgagtccggggctcccactggtatttttcatgttcatcatggacgtcccaggcagtagcacattctgagaaatggcatctaacctttcaaattgaagattttatttgctagaatattcactctttattgcttatctcaaaatcaggtgggatgagtgtcattactgtcccctcgtgcatgggcttcagatcagttgatagctaagcctagccgatgctcattcatctttgagattaacagagtagcttataaaatgcgttacacatttttgaaatgcaagcatgaagtgcgttagtaaaaaagttccttcagtaaatctttaagaatctggaaaaaagcacaagtcagtttaagagtatcatatccgtggttcactttgcagcagtgactttatatcttgttttgtgtgtgtgtggttctttgcatcattttgaacattttcttgaatgaaaatgagtcagatacagctactttgcttgtctcctgtagacacacactttgattaatagagttgttggcgaagtgttaaaagtcaagaatgttgttatcaccacacacagagggactggatatggggagtgtagtgggattttaaatgagaagcactgcatatcacaatcatagagtaactcctcgagtgattttacgtgatgagccgagcttccccaaagagtaatttaattggcatatttgaagctagaagtttctgacagccaccctgtaccttagcaacagcctgttctcttagtaagagtccctgtaaacaggtgggaaaattaaggcactccaaatgtttatcaagtgtaggacattcattatagtatttaccttttagagatatgtctgaaattccataagacagtttaagcaagccaccagctgttgtaaagggactgagaaagctctgactagtagacttcttcttagaatttaccagactttttttttttctcagaatgctgtgaatcataagactttcactaaactttcctattcttatcaaacagcaaataaactggctaaaaataactggaagaaatcttttagcatgtaacaatactcaactacatggaaataactctatcctgttttcctttgtaaaactgcaacaacaaaaaaattgtcattttcaaactgtgctgaatctctggcagtttttgaacccagctgcctgtcacggtttgagtctctgtactgtgtgagtgatgataggctaaatccacttccactgatttttctaactcattctcaaagttgtcttaaggctttcccattatttccaattacctgtgaaaaatgggcaaccaggaggtgggacacagtaccacaaaaccaagtcattgataggctcttaccttccacctggtggtggcctcagtcttcctttgaatcttctgagtaacatagcaccagagaaccatataaacagcccttgatttccagcctcagaggcagacatgagagctggtatgacagtcaactcttactatatcttatctgtatactatacaaataagggaataaatacaaataaaaagatttttttctgataataaagtaatgcatgtttccactggatagtcttaaaactgcaaatagttactgagaaaataaataaaatgcacttgcagtttcacccccagagatccataatcaggtcctctgtattgaaccattcaagggggagtccaggttccattggaacacaggatggatagcggccccagaagttgcacagctcgggtcttaaacagctgttaacatcttgtgtcacgcattatttgagcctttcgcatcgcctatgtagtttttctgttgttcttctttttttattttgctttctaaaacgagtgtcatgccatgctgacaggttaaagcttgttgtatcctgtatattttaatgtaatgcccgctaaccacagtattccacatcgagaattctgttctcagtgacaggtggactgttctcccgagggagggctgaggcaggaggaagtactcagacttagagaaggcatggagaacagggaaggcagggacagctgtgtgccccgtggccatcaccattgctgggacctgattcttgatgccctcctggctgaggagtcggccaacatccctggtacagacttggtgttattgagtgataaacaaatcctcttcctcctctctcctcgccccactcttttcttcctcttttctcttcttttctcctcccctcttctttcctcttctcttctctttcctttccttcaatgttctaagcctcagactgttcatttctagagctggccagatagaacagtgagtcacggtgagatattgtgtcccatggatttgttctaccagaaacgtttatgagccactgttggggagctctggtgctcttttgaaatatccaatagcatctttctgatgaaagcctggaagagaggttccactagtcagtgaactagcagaaatgaccaactacaatgataacccatgaccatcaattcacagtggctgtaaatcagtgccaattcagacctgaattaccaggtcaaatacggttccaagttgcacagtgaagatactatccagccaaaactaaaaccaaaaccaaatcaaacaaatacatgaaaatcagagctagatcttaatctttgtggcttgagaaatccagagaaaataggaccctgggtaagccctgaaattaaagagacgaatgttaatgacttaaagatttgtgttccagatcttcagtgtatttttgtttgagagttcttgtagctacctgaggtaaggtaacccactgaaaatcagcggatgtgcagcgtgaagttggcatctgacagctccttgatagcactgccacctgctcacttgctcattctagctacaacagttggtgggagaaacatgtgctagtcttgttataagtgcatgttaataaagttttctctgataatgcaggaaagctggggacagaggtagctagagtttgtttttcaaagataacatttctagtctggtcagatgcatccataagagggggaataaacagtgtaggctgatactcatctggtactaatatcctcttggtcgaagcatatcaggcggtgagtgaatacagggcaatgctcgaagaagacttgaagcatgggagcctcagctccaaggtcggtggagcgctctttgaatttagccctgcaacccatcagcagtgtggcctttggcagatcactctccaaaccctggtttcttcttctgtaaaagtagcataatagatattcttaatgcgtaacgttgggaagtaggaagtaaagagaacatatgcaagtgactttgtagcagatatttccttaaaggaatgctatggttctaattgtcagcatcactgtcgcaaatgagacgttcttaacctgctgtgtgccgtagagctctctggcaaactcatggagcccatggaactctcctcaggatagttttgttaaataaaaaaaattatacataatattataaaggaaatcatttagcaaattattactaatatatatgttaggcagaattatgactccccaaaaatgcctgtggcttagttgccagacctgtgaatatgttatgtcctatggcaaggggaaattaaaggtggagatagaattaagtttgctactcagctgtccttgacataagaaaattattgtggattatctgggtgagtccaatgtcatgacaagagtccttaaaagtagaaggaagagacgggagaacccgtgtcagagtgatgcaatgggaaactcgatgggccattgctggctttgaagatggaaggagaccatgaaccgaggggtttgggcagcctctagacattggaaaaaataagaaaatagattctccccttgagcctgtagaaagaagacggcctgccaaccccttgcttttagcccagcttgacccattttggatttatggcctacagaactatagataataccttggtattcttttatgtcatcaagtttgtggcgatttgttacagcagcaatagtaaactaatacagttatcaaattagataaaatccatgatgtatgatatgttcttcttgattaatttattaaatgacacactagatttgtgtccatagcaaattttaagaagttattagtgtcaataaaaatgtatagagagctatatctgaaatgtgattttgaaaatattagtaatttttattgatgatgaagtcacagtactaatactactgtggtttgttgcctatattaataattttaaaacatgataaatttcagttagaggttagtgaaaaatagaacaaatgttttcctatacccagcttcagggagcttcctgaattttatgcatagagggtatgcaggccccagattaagagtccctggtttagatatatgaaagaatgagaaaccttctaagttcttcaagatatatacaattcaaaagcaaaattagaaaatcactgcagccggaaagaacattaataatccattagccggcgctgtggctcacgcctataatcccagcactttgggaggccaaggtgggggtggatcacctgaggtcgggagttccggaccagcctgaccaacatggtgaaaccctgtctctactaaaaatacaaaaattagctgggcatggtggtgcatgcctgtaatctcagctactctggaggctgagacaggagaatcgcttgaacccgggaggcggaggttgctgtgagcagagatcgtgccattgcacttcagcctgggcaacaagagcaaaactccatctcaaaacaaaaaataaaagaatacgaagcttaatgcctttaaaaatttattctcatgagaaaagaggcagctcatggatgacctcagtgaaatcagtacattctctgtggagacagtctttatatatcacaatgaataaaagtagggagcataatttttaaaaatggaggactcaagacacagattgaaaaggggagcacaaatataaagctcacaggaataatactaaatataacacacctgggtagaaacgcatcatttcctctagtgtttgggacagaagtaataacaatacttcaaatatgtatttgaagaatatatattttaatatacaaagaggtgaggttgtcacataaaatagaggatgcccagttcaatttgaattcctgataaacaaaacataatatttagtgtgagtatattccaaatattgtgtggagcatacttatcctaaaaattatgcattatgtaactaacatttagattgaaatggtgtcctgtattagctaaatatggtaaccctgctgagaagagactactaattctacctttaggctgtatgaagtaatatttgcagtaatagatattgtttggagtatctctgcaatgaaattctctttgagcttgctctctttaaaaagagaagcctcgtgctgcatacctaccatattgcctctccaagcccactctttccctgtcttcaccctgctctgagccccaggaggctggctgcctcaatgggctcccaggtcatgggcttcctaccaggttccacaatgggaggcatcagcaggagactatagggcagaagagcagtatcgttagagagttgattttgtttcacctgctccttcccattcaggttgctctgaaaccactcctgcccactaaccctccatgcctagggaagatgacagttttgagctgctcttagcccctgggtactgcactggctttgtaaattgcccctttattaatgattgagcttgaaggtgccatctcttcccttctggagctttaatatgctgaagaatatgatgtagatctccaaggtcaagagtaccgtctgcatccatgaagctgtgaattagaaaaagaaaagtaagatttggaaagaaaatagttaagttgacattcaatagtgaggtcttgctggtcacttaatctctcttttaaaacagatatttattcctggaaggtttctggaaaaattaatagaagcaggagtcttaatcagttgaaagacataaagacatagactacagaaataagcagtttattactagaatgtctatgttactcataaaacaagacataaatcctgtatttatgaaatatatgtatttaaagggctttcttcagaaaacttaaaaaacaaaatatttagaaactatttcataaatatttaggaaaaaggcaaaaagaagcaaatcatgtgttgtcctgagacttttttcctgcaatctcccttttctcctcctccctcccagtactgctgaagttttcttcctaaagaagggtactcagccgggcgcagtggctcacgcctgacgcctgtaatctcagcactttgggagaccgaggcaggtggatcgtgaggtcaggagatcgagaccatcctagccaacatggtgaaaccctgtctctactaaaaatacaaaaattagccaggtgtggtggtgggtgtctgtagtcccagctactcaggaggctgaggcaagagaatcacttgaacccaggaggcaaagattgcagtgagccgagatcgcatcactacactccatcctgggtgacagagtgagacactgtctccaaaagaaaaagaaaaagaaaaaaagaagggtgctcagatcttcacctccagcacagacacttggatgacttccttctatgcatctgagaagttttcaaaaaatatttgctaaatttaattgcatttctgcttctttaacccaactgtcttagatatggtttggaaaagagcaagagaaaagtaaagttaaattccctaattatttcttaaactttccccagaaacttaatgggcacgttggatcatagtttgtcccacatagtaaatgagacacatgcgttgctggtgagtgccttcttaaataagaacagagatctttcatctagaggctggcacagattggaaggttctggctgctatcatcctatatgtagtagagttttggtttttttgtttgctttaatctgaatgtctgattgaggtattcaaagagcaagagagaaacctgtgaagagatggactatttgtgtcagaactgtttaatcttgtggctaggatcacttgtattgttgagctagattcctcaatagctgtctagatatttgacatatggtgttttactctattgtggtatatgaccacataaacagataaaatagtagtaatcttttcaatcttttatagtctgcaagtattcatacacttatttcaaagtagtctgtttctagcttaggtaaatttagatgatttcattgaatactgtattaaaaacctgcttcattccagttaatttttttcaggaattattactcatactacaaggcattatttatagctccagctctcttacatgataaagaatgagctgcgtattacattgctataatgagaaattctcttgtgtttaaattaatctcccttcttagcattgagaaattctgtggattctaaaattctatttgagaattgtaagaatgttttattactctcttataatatgtaccatattttttctctcatatatctgtcagtgatgggtatatatatatatatatatatatatatatatatatatacacacccatatatatatatacacccatatatatatatatatatatacacacacccatatatatatacacccatatatatatatctatatatatatatatatatatatatatatgggtatatatatacacacacactatatatatatatatacatagtgcatatatacatattatatatatatacacatactgtatatatattcatgtttacataggtatatgtgaaatacatgtgcttataaatcctgaacaatgccaggcagctgtttttataatcttgctggtttatacagaagtcagtttctaccacctttcttccaatcctagggaagttgtctctaaaacacccatctacagcagaaagggaagcccatgggccagccactgtgtggttttttatacgcattgctttgtttagtcctcacagcagtcttgcagagcaggtgtggcgtattcccatttttagataatcaaactgaggctcactgaaatacagtgagctctttaaggttactcagctcgtaatggtgggtcattgttgccttcatatacaattgacaatagtaattcctcctggcaacaaaatgagatatgtcctgaactctcattgtgaaggaggcactgtgccaaacatttaagcagcccaatgacacagagttattattcccgttttataaatgaggaaaaccgagacacagaaaggttatgacatgtgcagattttgaaacccagatctaatgccaaaatccatactcttaacactttactatgcaacctaccatgtgctagactttgatgagtctgttggattatactcgaaatccagtacttcatatttcataattttagtggtttcaaaatccacgttattttgaccaattccaacatagcagttctcatagctggaaatacaagttagaaatcagcttccatttagtgatgcaaaactctgcaaaggcaaatgtatgcaagctgatctttatgaaaagcaatcccaattaactttattttttaaacaatttatttgtatattgacaaataaatgtatatatatttattgtgtacaacaggatgttttcttatatgtatacattggggaatggctaaattgagctaattaacctatgcattactgaatatacttatttttatgctcagaacacttcaaatttactctaagggcttttcaggaaaacaatatgttgttattaattgcagtcaccgtgttgtaggatagatttcttgaacttattctttctgtctgactgaaattttgtcgtctttgaccaacatctccccaactccccacccctgcccccacccctggaaaccaccattctactcactacttctatgaatttaattcttttagatttcacatatgagatcaagcagtgtttgtcatttgtgtctggcttattttacttaacataatgtccttcaagcttagccatgtttcaaatgacagaatttccttttttataaagctgaatattatttacttgtgtaaattttctttattcttctgttgacacttaggttgattctaatttttgtctattgtgaataatgctgcaatgaacatggaggtggagatatctcttcgatacgctgatttaattcacagcctttggatatagatccaacagtggaattactggataatatggtagttctatttttgattttttgaagaacctctatactgtttccaaaaatggctgtaccagtgtaaatttccaccaatagagtactagggttctctttgatacacatcctcaccaatacttattatcttttgtctttttgataacagccatctgataagtgtgaggtgacatctcattgtggttttaatttccattttgctgatgattaatgatgttgagcattttttcatgtatcgattggccttttgaatgtcctattttgagaaatgtctattcaggttctttggccattttttaattaggctatttgtttctttgctattgagctgtttgcattccttatatcttttagatattaatcccttatcagacatatggcttgaaaatatattctcttattccataggttctctttgctgattgtcttcattgctgtgcagaagctttttaagttgatataatcctagttgtctacgtttgttgcctgtgcttttagggtcacatactaaattcattgccaagatcaatattatggagcctttcccctgtatttacttcaagtcttatgtttaagtgtttaatccattttgagttgatttttgtatatggtgtgagataagggtctaatttcattcttctgcatgtggatattgttttcccagaaccatttatttaagattgttctttcctcaatgtgtgttcctggcacctttgttgaaaatctattgactgtaaatgtgtggatttgtttctgggctctttattctgtattctgtgcaactggtctgtgtgtctgtttctatgccagtaccatctgttttggttactgtagctttgtatatattttggaggcaagtagtgtgatgcttccaacttgttcttttgctcaagattgctttggctatttgggggtcttatggggtttcatatacattttatgctaatttttttctatttctttgaaaaatgccattttgatagggagtgcattgaatttgtagatcactttgggtaatatggacatcttaacaacattaattattccaatccataaacatagaatatttttcaatttgtattttcttaaatttcttttaacaatgtcgtagtttttagtgtacagatttttcacttccttggttaaacttattcctagatattttactattttttggcagctgtaaaaaatgagactattttcttgataacttttttggatagttcattgttagagtataaatattctactactttttatgtgttgattttgtattctgtaatttttttgtatttatctattagttctaatagttttatggtggagtatttagaattttctacataaaagatatgtagcctgcaaacagtgacaatttaacttcttttttttccaatttggatgtttttaattcctttctttttcctaatttctccagttaggacttccagagaagtagaacagaaaggacaagagtgggcatagttattttcttcctgatattagaggaaaactttcaatttttcatcattgtgtacaatgttagctttgggtttgtcacatatgccctttattgtattgagcaacattctttctatacctaatttgttgagaattttatcatgaaataattttgaattttctcaaaagccttttctgcatctattgagatgcacgtggttttccccttcattgtggtaatgtggtgcatcccatgtattgatttgcatgtattgaaccattcttccattctagggaccaatcgtactgatcaaggtgaatagcctttgtagtgcgctgttgaatttggtttgctaggatacgggcctgcaattttcttagagtgttcttgtctggctttggtatcagggtaatgctgaccttgttaaatgagttgcaagcttcacctcttagactttttaaaataatttggggaagattaggattagttcttcaatatttcatagaatttatcaatgaagccatcaggtcctggatttttccttgattagagtctttttactattgactcaatcttgttactcatctctgatctattcagattgttatattcatgattcagtcttggtaagttgtatgtgtctagatatttatctgtttttttatgttatccagtttgttggtgtataactgttcatattagctttttataatccttcgtatttctgttgtatcaggtgtaatgtttctccttttatttctgattttgtcttctttttttcttagtctagctaacgatttgttggttctatttttgaaaaaaaaaaacccaactttagttttgttgatcttttctattgtttttctagttctattttatttgtgtttgtactgacctttattatttcctcccttctaccaattatgggcttagtttgttctcctttttcttgttccttgaagtgtaactttaggttatttgaaatcatcttttttttttaatttaaaagtttttttgttaaaaacttctttattagaactacttttgctacatcctataagttttggcacactgtctctgttttcattagtctcaatgatattttagtacttaaaatttagacgtaaaaaatgacctattaatttcttctttgacccattgatcattcaggaacatgtttaatttccatgtatgtgtgaatcttccaaaatttctcctgttattgatttctagtttcataccattgtggttggaaaagatacctgatgtgatttcaatctccctagatttgttaagacttatggcctttcagtctatgcatgtccttaaatctgaagtgactgtcttacaagcagcacatagttgggtcatgttgtgttctttttaaatccacttatccactctttgtctttttgttgtaaaatttaatccatttacattcaaggtaattgtaaataggtaaggacttattagtgtcactttgttactggctttctggttgttttgtagatcctttgtttctttcttcctctcttgctgtcttcctttgtgattaggtgattttgtttagtggtgtgctttgatcctttactttttatctttgtgtgtctactataggtttttgctttatgattaccatgaggattacataggtggcttatatttataacaggctattttaagctactaatgacataactttaattgcatacaaaggctacactttcacttcgcccaacagtttatatatatatgtatatatatgtatatatttttttttttttttttgagatggagttttgctcttgttgcccaagctggagtgcaatggcacgatcttgactcactgcaacctttgcctctcgggttcaagtgattctcctgcctcagcttcccgagtagctgggattacaggcacgtgccaccatgcccagctaattttttgtatttttagtagaaacagggtttcaccatgttagccaggctggtctcgaactcctgacctcaggggatccacctgcctcggcctcctaaagtgctgggattacaggtgtgagccaccatgcccagccagttttctatttttgatgtcacaatttggatcttttaatattgcatatttcttaacaaattgttgtagctaatattatttttaatggttttgtctttgaaccttcatactaaagatataagcaatttacatactaccattacagtattagagtatacttaatttgaccatttacttacttagactgagttttaactttcatatattttcgtgttgtttattaatgttctttcagcctgtagagctccctttagtgtttcttgtaaaaggggtctgctggtgatgaactacttcagctttatgttttcctgggacaatttttattcttcctttatttctcctaataataagctaatatttaaaaatgtaaaattttgacattaaaaatataagtgttggcaagagtaaaagtatagagattttgtatacaattaaagttatgtccttttctgaaggacaggtttgttgaattggcagttttttctttcagcattctgcatgtatcatcccacctcctcctggtttgtaaggtttcttctgaggaatctgctgctagctttattggaacccctttatttttgattcacttattttctcttgctgttttcaggctcctctctttgtctttgatttttgatagtttgattatagcatgtcttggtgtagtcttgcttgcattgaatctgattgaaaattttgacttttctgtacctgtatatttatacctttccctagatttggaaagttttatactattagttttttaagtaagtgttctacctcttagtcttcctcttctttgcctcaaactcctgtaatgcaaagatttgctttcttgaattggtcatataattccatgtatactttcttcaaattttctcattctttctttttttctgttctaattatataatttcttctttaagttcacagattctttcttctgccttatcaggtctactgttgatgacctttattgcatttttctgctcctcgattgtattttctagctccagaatttgcttttaaaaaaaaatgtcaatctcactgctaaatttctaatattgatcatttattgtttcctgatctcagtgaattgtttctctgtattttttgaagagttctgaggtttcttaaaaattttttgaattatttgtgagaaagatcataaatttctagttcctttagagttttattttatttctttggtcttggaatctgctctgggagtgtggtgggaagtcagcctgttctcaattagttcttttttcttatttttatataactggctaccaatgacctatattcaaatagaaagcaagccaatttcttaatttaagtggaacttatcctcattatctataatctatacctaataacacatgcattataaagtagaatttatcaaaggctctgaagcactagaataggattttttttttctaaagcaatggaaaaatcacttgatttatttgaaagatatttattggttacttattatactctggtcattattctaggtgtcttagatatttgagtgaacataacagacaaaagttttcctttatgggatttctgttgtgggaagaagggtactacatcaaacctaataaatatgtaaattacatagtatgatcaaatgttatgtgtagcatgtgtgaaagaaatgagacccccgggaaggggggttgggagtgatggcataggggttggcaatagtcagtgggggcaaaatgcttcaaacagggcttgctgagaaagtggcatccgaggaaatgcttaaaggaagggaagttgctggtgaaatgtatttagaggaagagcttttcaggcagagagagaagctaggcaaaggtcttagggcaggagtgtgactagcatgttgcagaaacagcacaaaggccagtgtgcctgggttgaatgaattgggtgtgggggtgtttatagaaggagggtaggtaggacagagaggaaatgggagacaggttacctggggtattgcagcccttggaatacccttgaatggtacagggtacttttgcatggatttgaacagagaatctaatttctgttttagcaactgcagcagttgctgaactgagaaaagacagaggtgactggagggtgggggtggcgtgcaacactagaaagaggcaggcctgcaagggaaaattgccagagtcccagcaatgcttgacaataagagaatcgtggcaaaaaggttaggcagaagcaatcactctctggtcatattttgcaggtagaataagtaggatttgttgacaatgtgaacaggagatatgagataaaaaaagagagcaattaccaataacctcccagaattttgccttattacctgtcaaagagaaaaatagatttttcactagaaagcatttatttttaaaaaagaataagagaacacatttgaagtgttcgtaattaaattaattttagactctaaaattgcactttcttttatgatatcgtaagacaaaatactttgaaattttacaaacatcttaaaacacgggggcagagactcacagattttataagctggtgaagttttatgtttgaattcctcatgtgcccaagtcacgtaaaagaataatggagctcatccatgtcatctgtagtttaaaaagtgaccttaaatctgttttaattaattattttgccaaagtttggcaattttagagaaagttgaagaatgatttttacactaatagaagtcagcaaaaatccccagtgacaaggaatccttgtgtgaatagagaatgctggtgtttatactgacacattttcatgtccatgagacagaaaccttgcaggacagtgggagagaatgtggggataaaaactaagcaaagaaagcacattaacaattggtcctcatcctaccaagtgccagaagctcctgcctgcactgccaaatggctctagacaacctctttgtgacgtcagggtgggggtactccagccagacctctctcaaatcttttctcaagaatgaggtggaagttaaacaaagacttcccaaccctaacctccttcctctcacatacccttacctgattcctgcatggagaggaggatggtatgtgatccatcagccacacagtgggaaagtaatatttcaacatccatgtaatgaaaatatactgtgtgaacctacatagtaagtaaaagaaattaaaatgtctagaatccaattatagattccatttttttaaaaaaatactgtatttattgtgtataacactgtccttagcaaatcacatagacctactgatatggtttggttctgtccccacccaaatctcattttgcattttatctcccataattcccacgtgtcatgggaggggcccggcaggaggtaattgaatcatgggggtgggtctttcctgggctgttctcatgataatgaataagtctcaggaaatctgatggttttataaaggggagttcccctgcacacgcactctcttgcctgctgccatgtaggacatgattctgcttctcatccaccttctgccatgattgtgtggcctccctagccatgtggaacagtgagtcagttaaacctcttgcctttataaattacccagtctctgatatgtctttattagcagcataagagcagactaacacacctacaaaatcttacgttgtatcctaactgaataatatatctttgatttttatttccatttccaaaatttaggggatggaagatgtcttagggttctctggagaaacagaaccaatggtacttatttttttttttttttttttttttttttgagacggagtctcgccctgtcgcccaggctggagtgcagtggcgggatctcggctcactgcaagctccgcctcccgggttcacgccattctcctgcctcagcctcccgagtagctgggactacaggcgcctgccactacgcccggctaatttttttgtatttttagtagagacggggtttcaccgttttagccgggatggtctcgatctcctgacctcgtgatccgcccgcctcggcctcccaaagtgctgggattacaggcgtgagccaccgcgcccggcccttatttatatatagaagatatttattttaaggaattggccaacgtgattacggaggctgataaatccagaatctgcagggtgggccaagaggttggagaccttgagaagagcaaatgttgcagtttaagttcaaagtcagcaggggacccaggaaggaactgatgttccagtttgaaggccatcagcagaagaattattttgcttgagggagctcagtttcctgttccatttaggcctttaactgattggatgaggtcacccgcattagggagggcagtctgctttgctcagagtccactgactaaaatatcaatctcatccaaacacaccctcacagaaacacccagaataatgcttgactaaatgcctgggccccctgtggcctagctgatttgacatcaaattaaccatcacaaaattttcttttctttatgcaaattttatagcattacttttgtgttgtggttttttagaagcatagacctagagaatagtgcccatgacctctgactatcctattatacatgaggattgcatagtatggtagaatctcctataatattctttccacgtggctgcagaatctctgtgaattctctttgaaatcgctgtgaactctcttgaactcatttttgttggcttttggtggggaaataactagaatttaaattgtgtccagtaaaggtgattctggaaatgaagccaaggaaaaataaaccatttgcttaatctttcaaggggcacaataattggaaaagacaatagtgaaataaagctttttcttttcactgttcgagctataatatccctcccaggtgagaggtattctggctgtaattcccaagggaacccttgtcacagtggcgtctttagtgagatgatttgatttttaccttttttcctttgggtggatgcctttctcctcttcttgactgtgcatgtgtcactctgtgcccacggagacagaaaagaataaaaagcttacctctccccctgaaatgcagcagagtcaaacttcagagttcagcagtttctcattgaaactatcaggcaatctgatgcagaaagacaacctcagacatgactgagccttcaaatagaagtttccagagaccaaacgtctcttttcctggatccccgatatggagagaagccgtgatctccacagagacttccaagctctctggcatcactttagcagagcagcccttgctgcggaagcagaaactcagagaggaagggctttgctgctggggctcaacaaaggtgtccgtctccagccagccactgttccaggtgcggagtacagagagggcgacacactcatagagttggtaagttcattgagaatgggtgcataacaggaaaagttttgattaatgtggagccttaattcaaaatgtggtccctgaccagcaagatgagcatcaactgttagaaagacagaaacatcaacccctctctggatctcctgaaccagtgcctgtgttttcataagataccccagggatttgaatgtgccttagtttgcgaagtgccatctagagtgtacaagaaccagaatgtacataaatttgactctaatcaactggcaatggcctcttcactatgctggctacaactctcttctctctcctgtgctccttatctcagtgaatagcagaaccatctatgaaaactcatgccaaaaacctggatgtctccctggaaacagccctcaccctcaagcagcttcataggttctctctagaatgtttctagaagctgcccatcttcactgcctctcccctggttccgtctctaagattattaactttctcacgggcttccttgccttcaccctcagcccttccaatggattccccaccctgcagttatgctgattttgctaaaattcaaatcttctcatgtatccctctgctggaaatggttgagtagctctgattactctcagcatgaacccacatgacttggtgtgacttctacctctctaaggatgtggctccagcagccccctccagcctcacctcatgcaacacccaagcctgcctgagagacaatagcagtatgcttcactggtgaaatgttttatagctacctggagtgcttaccctctacgtgtgagcaggcagtctctctctctctctctctctctctctctctcacacacacacacacacacacacgcacgcacacacgcacacatgcacacacacagagagagagagagagagggagagaaagagagagagagagagttacaggttatagagagagggagaaagtgctttctcaccctgagattattccatgaacccatagataagtcagaaccaggaattacataaaaggcccatgaaaggttaaatttaaaggatcaaacctttgtgctaaagaccctgcttcaaacatgtggagttcctcatggtcttattctctgagtctgcatgttgttgttaccacctgcttacctggtgctcccagactgttagaagcagaaagtgagaccaagcagagttgctaaaggcaggcactgatgaccccatgccagcaggactggcacccaggaaggagcagaagtactctagggagccaagcaggagctcagcggaggccagggtgagggcaggtgtcctacaaatgtcaactccgatggtagctgatttcaagctctgtttgatgacagatgttgatcccagtggtttcaagcttgagccattcaaggaacattagaaactagaaaggaaatattgcataggttcttcaaatatcagtttaccccgtgaaaattcaagctttagtcctaatgcttaaacagtgctgtattaaggtctgtgtgcacttcaaggttaaaacctgaactgtaaaatatcattttttacagttatgggcccttttatgctacaaccccagaccccctgagggccttctcattccttccttctccttccccctccctcccctgccatcccctcctctcctctcctctctccttccctttcctcttttctttctctttttcttctttccttccttcctgcctgcctgcctgcctcttttacttgacatttattggtgagtaaatactccatgccaggatctgagtttacaatggttggtggctaggatggacagtctggagtcatctgaaaaaggacagtcaagaggggaaggaccagccagtataaaggctgtgagttgaaagtcatagagagagtagtggaaagaaaggcccaggataaaccatgccgggtgattatcccaagtcctggtgaatgcatttcatgtgctttgttgactgtgttactgtatattcactagcaactgagtggataggggtctctccttatagttgggtgatctgttagccatctatggctgacctctaggaatcagggagggtcttttgatgtgtaatttgaatattagctatatctcaggctttatttttgctgccctcagtttatagtacgtagttttgtaagctgccttaaaaacttttagacacaagcaagttaaaagaatatgcagtagatttaaatgaggctcctatttaaaaacatttaataaaagtaatggtgtaataattgtgttggtagtcaaaaggtaaatttcagactgtgtgtatatgtgtgaaaagtcagtgtgtatgtatgtgtatgtatatatgtgtgtatataaatatataataacatacaatataaaatatacatttgacacacaatttaagtatacaggtttaagatattttaaagttaaataacaaatagaaataacatatgcatgtaagtaacatctaaattgttctatttaagtatgtaatttataaaataaaattatttaaacttaaatacattttatttatttatttgttattggtggattcaaaaactactgatgattagccttctgtattagttccttctgtgtctggtagaaagtcagtgtgggccgggcgcggtggctcacgcctgtaatcccagcactttgggaggccgaggcgggcggatcacgaggtcaggagatggagaccatcctggctaacacggtgaaaccccgtctctactaaaaatacaaaaaattagccgggcgcggtggcgggcgcctgtagtcccagctactcgggaggctgaggcaggagaatggcgtgaacctgggaggcggagcttgcagtgagccgagatcgcgccactgcactcactccagcctgggcgacagcgaggctccgtctcaaaaaaaaaaaaaaaaaaaaagaaagaaagtcagtgtgatattgaaatatgtagagtggctgactgtgttttatttttggagggtggatgcaaagggggtagcagggagcttagtagcaagggacctcagtgagtcttgtgttgtcagtgaggccagaaattgatgtaggcggaggaactaaaacctagttcttcaattcctctgtataataacataatgagactctggaagcgtctctaaaagctgctggaggaagcttcaaggacatgcagatgagtggaaatgaaggagcaggagcaaagaaaggtgacctccatgacagagcaggaagctacaggctgggactgttggcgtcaccaaaacattctctgcaggagggatagacaagaacttatagatgacagcatctaccatttgattttaggattttttcagtctttgcgctgtgtggcaattgtcctcatcctacatctccctgtataaaacaggtaaccacagcagacttatgtcagcagcactttggggaatgagggagagagagttgcattttatgcttggcctcatgcaagctggagaaagaacagcagcttcaggagatgacgcagtggcaggaaccagaggaaaaaaaaccacccatgaacattatccaagagtttcttttttaggtgataaaatcatgagtttcatacaaatagcagatgaacattgagtcaaatattttatttaactcattcatgaatgagggaattgctaagatgttgcaactggttccattgaagattctatccacagagatttgttttctatggggcaaaatgtatttgcagcactgagaacaggagtcctttgccttgctatggacaggaagtgttttcattgctttatgttttctatcagttaacctctatctctgcagagttgtaaacagtcaagtcaaagacaagctaaggtatagataggatggatggatgaactggatagggcatttaatgcccacttactcaatttctgcccacttccacctttcacaattctgccggacaatatatttgagacggtgaaatattcgggaagcctctggacagacccataaatcgtagtctttggatgtggactttgtttataggtggggaacctgctgaagattagatgagtttgggtgggttgagacattctcgaaagcaagaaccttgtctaacatcttttgttgccgaggacctacatcctgccccgtagaattaacagttcgtaattattggccaatagccaaaatgtcaggattaaaattgcttacctctcagaaaaattaaaaatacttcctcagccttggtaaggaaagaagtgattaaacatctagagttttaactttctattaaaattttaaattggaaagaaccatagtcatagaaagcattcacagcaaactttaggaacacacaaaagacacgtgtgtaccagggagcccacgcacgtctgggtactattgttaaaatgagaagaactaggcacactaatctattccagggataggatgcttgaaatggacaaatagtaatctaggtttattaatgggtattcatagttgttaaaggaattatatataaataatttccaacaaacagcttaagaaattttaacttatgtttaattataacatgcctccgttatacaggaaaataaaaagaaaaaaattatcattgtgtaatcaggcaaaaacatcatggcttgttgatcctcacaataatattgttaggagaaatagctattaaagatataattcccatggtaatttcctgttgaaatgtttggccagtgacactaaaaccaagccaacttaaataaatatattgcccgtttaagttgatttcacttaaaaataacccacagtaatatcataaatgcctaaaaccatacttatccataataggtagctgttttttcctccttactattcaaatagattcgacatgaaatgaaagtaaaatctcacaatggtgaaagacttctggaaattttaaaatagatatttgctaatttgtaagtcctgcaagatcatgaggagtttgtgcttttctgcagatgcacctgcatgtttacttttcccattaaatgacatttcttctgtttctaatcttctagagatgcagaagaattgcgtgggacattttaaaatattagtcacaactaatttgtcatcaaattttgtgagatctttcactgacacagatgatcagtatataaaaagcaagtcaaatatactttaaaaaataattacatccacagcaccacaactctaccttaataaaaatttcacaattaggcgggctgtgtgtcattagcctccctgatagcattcagtgtattgtcacctcatgttcaagcacacatctgatagaagcaagacattctgccacctcattccaccttctctattttacacctttaaaagtgtggaggtagtgtgctaagagttataaattgtcttgctgaaattctttgggagaaaacatagggggcttccatataaaataaacagtgagactcaaaaattctagaatcaaacatttattgccctctgctgtcagggtccacctcctgggaatgtgtgttaccttttgctctaattctttttgaaatgtctccagagagtatgaaaatgtagtgatttctctggttttgattttcaaaaccaataaagtttttcctttagtccaatttttaaaacacaaaatgttttcaaagtatacccatgttgtagtgagtaaaaattctgaaaaattctctatattaaaaaataaaaataaaaaagttgagtctagaaggggcagagagcaaagaacagtgtgaaatatctacagatgacaaagacagtcattagctttattattttgggtgctaggcacgtgttttcaatgtagttatactctcccacagctataagggcataaagctacatgttagaaaaagtgcttctgacactacataagtgtacaatagctacgtttagaactgttcagtgtggtcatattttaaaattatgaaatgtagggaagaaatgcaattatgtgaataaaaagactggaaatggtcttcatttctatgcaaggatggccacaaaaaaggtgacatggagccattttcatgtacaaataaatgagaaataatctcacaaggaggtgagaggctgcacttgctcttccccccggagtggtgttgccatggtaattatagtgacttcagacacttctgagatttctggtttcacactcaactgggaacggcgaatcgcctctatgggtgacaggatccactttggatcaataagcagtgcacgtgtgttccgggtctagctctgcctttcatttgctgtagcttcataaattgctctgtccctcactcaactgtgacacgggtcctgtctgccactccgggttgttatggatggagagccaaaacgcagctgctcaggaagtaactaggcagtgcatgtgggttaggatggcaagatttagtctcatcatttgttgtttccacagttgaatatagttctggctttattatgaactttaaaaatcagaagaagaaaatcacactttcgtagtgttgttggattatttttggtcatttccactcatactgaaaaatgctgggtatttgagtccatttcattgttcctgagcaaggctttcctttgctcttgtgagcttttttttttttttttttttttggagacagagtcttgctctgtctctgttgcccaggctggagtgcagtggcatgatcttggctcactgcaagctctgccttctgggttcacgccattctctgcaagctttgcctcccgggttcatgccattctcctccctcagcctcccgagtagctgggactacaggcacccgccaccatgcctggctaatttttttgtattcttagtagagacggggtttcaccatgttagccgggatggtctcgatctcctgaccttgtgatctgtctgcttcggcctcccaaagtgctgggattacaggcgtgagctaccgcacccggcctgttcttgtggtctttctacaggaagtgacttttgctgcagggagcttctgttgggggaaaaatgaatttaatagttttgaaatagtgggttttaaaaagtgtatgcccaagtttatttgacttacagttttggaggctgagaagtccaaggtcaaagggccgcatctggtgcgggccttctagctgcagcatttcagggtgtagggcatcctaggcccagagggcaaaagcatggcctaaaagagttgtttttttcccagatgagaataaattgttaattctttcccaaatcagtaattttggtaggttgactaaaatgttttctgattgcatcagagaaaagatataaatattgatatttagagtgccttttgaccttgagccagtatcatctttaaggtccagttatgtgaaattcaaagtgtcagtgataatggccttcctaatgtacattctttactgtcacttaaactttctgcactcaaaaccatgtggcacatcgctgtttaatatgacagtccagcacgaggccttacattcacaaccttcagtagcaacagcgtcaaatttctatcatcaaaattgtagcatgtaaatatgtcacatgaagataggtttcaatacagaatgtacgtgagagataagtaatgtctacaaacattaaaaattcctcttgactatgtttcaagtttctagaaaatgaagtatgatatttgcaaaaatatagcttcaatgtgttatgcatagaacttaatgtgtgtgaggctatgaacaagactgtctcagtctctgacctgttatttgttcacactgagttcagatttttaaagggaagaataccaggagggaaagagcaatactctctcttccctaaaaggctttgggaaatgctttatctcatgtgttagtgattctttaacttttgtgtatacagccacatctagaaagagactatttccttttctaacaggagcctatagatttctaaaaggagcctaagtcagggcacaaggaactgcctctgggctgtgaggctggagcagcctttgaacaaggactcccagagaaatggcgtttgaccttcctctgcctcatttctggcgttcttgtttcttaatgttgggtgcaggcagtttctgtcacagctgactgagtttgggggtaaaatattgtggcacaatatttagttttgtttaattaaataaatgacatggtaaacaaatctcatacatgttgctatcatttacctggcacaaaagaccattagctgtgtgtgtgagtttgtgtgtgcgtacatgcatacgcatgtacacacacatatgtctgaaaataagattcaaaatatttacaacttatttttcttcactgctaggatattcatttttactgctgacagatttttaaaaatcatgtcagtccatgtggagaatcccatgtgatatggtctggctgtgtccccacccaaatctcatcttgaattgagctcccataatcccctcgtgttgtgagagggacccagtgggaggtaattgaatcatgggggcaggtttacccatgctgttctcgtgatagtgaataagtgtaatgagatctgatagttttataaagggaagttcccctgcacactttctcttgcctgctgccatgtaagacatgcctttgctcctcctttgccttctgccatgattgtgaggcctccccagccatgtggaactgagtcaattaaaactctttcctttataaattacccaatcttggatatttcttcataggagtatgaaaatggactaatacatatgtgagatgtttctaaggggactaaggaattaagcatatcagaaaacatagatgagcagatgttacccctgcaccgttaatgatgatgatgattgtgtacttccctgagcagatggaagcactgggctttatagggtagtaagagctgagtttcatgtccaatggacctgagtggtgagtggctttttcatcttggttaaattactcatggccatgtctctggcttcatcacatttaattgaggacaataatagaatttataggattacttagacgttgaaatgcctcattgcaatgaagcacttagcacagcacctggcacataggtgggcttctgttcttacagcattcttcccccttatctgcagctccactttctgcagtttgagttttccttgatcaaccatggtctgaaaatacatgagtgcagtacagtaagatgtttagagagagagagaccaaattcacataactcagaatacagtatattgttttaattgttctattttattattatttattgttgttaatatcttactatgtctaattttataaattaaactttgtcacaggtgtggatgtatagaaaaaaacaaagcatataaaggattcagtactatccgaagtttcaggcatccattgggggtcttggaagctgtgtataaggcagggctactgtatttgttattttgttgcagtcattgtaattagttgtagttgtggtagtagcagtaataacagtagtgatcattgttagatttatagttctttgctcaaaatctcagttcaacacctgaaattaaaaatcctccctattggccaagaactgattttttaggatgttccatatattttgaagattatatgtaacaaaaagtggctataattttagtacaatgtaactttttacaatttgctattttatttggtgcatagaaattaaggtcatgcaatcactttggaaaatgaccaatctttttaaaagctggctctgtgcctaccctatggcaaagccattccactcccagctatgtccccaaaagaaaaaaatatttacctatgtccacatgtactacaggttcccaggtacacacaggcatatacagtgttcttggcagcacttttcataatagctccaatcaaaaaactatgcaaattcccccaaacagctaaatggagttatgttcattcaatataatacagctaagaaatgagaatgaacagccaacaactacacacaaccatgtggataaatcttgaaaaggtaatgttgaaggaagagagacagacacaagagaatatattctgtgtggttctatttacataaacttccaaaacaggcaaaacgaacctatcctattagaaatcaagatactgggtggctttgaaagaagagtaatgactataaagaagcatggggggtggggctcaggggtcctggtaattttttttctctacctaaatgtgggttgcatgggtgggatcagttggtgatgattcagctgggctattcagttaaatgtactcttctctaggtatattacactttactgacaagttttttaaaaagacagaaaaaaatgtcagtggagaaaatgttgttattttatcttttaaaatactgaataaaatgttaacaatttaaatgaaaatgcatgattggattttagattaaatatatcattttgataatattctaaaataattacaaatttgtgctcaaatgaaaagcagacctctcagtgttaataaacactgtgtgtaattcagttcctcaagtagtatgggttttatcactttcttccaaaacataaaaaagtgaaacttactaagtttcatatgctgttttaatgggcaggttctctggaaaggatgtaagtacatatggtggaaataattatagatgactcacggccatcagtggaaatttacacgtcctttggaacttcaatactgagcatctgagaaattgcaaatttctactatagaaaagacgatcagaaaaaataccgttttcttttttttgccattatcattttttaactatctccttttttgtgtgttaagcatggtatctcctttttcctatttcttttccttttcttctggttcttatcttttgttagatcaatttctgattttctatggcagatagagagctggttttatttttctagactattcagtgaaaaagaattcatattcctctttatttgtgaatattgtatgaatgaggtttgaacaggtatattttgaaaatttctttttaaattaaaacacattttatacttttccacattgagatcctaaatgcctgtgggctgactgcagtcttccttaaatactatttaggaagttatataacttttgttttctttgagctcttcccaaatattccaaatttcatgcaataaaatatacttatttgtactttaaattttaaaatgaacattatttttatcaggtcttggcttgcaaaattatggtcacaggactaaggtgagaaagtaaacgtttttcctactctctctgaattttccctcaagttttttttggcagttcatggttaattggattgttcacgtagagaactttccactcattcttcttattgaggccttagcagggaacactgtataacatagcctacaatgactgatttttgagcccttcccatcaaagctttccctatgacctgccctgcccaccacctaaccaatggttagtcagcaaagaataaattctttcccccaaaactccccagttatagtcttctgaaattcctagagtcccttctgtcctcaccttaagcacattcgaaagctcattgtttagttaagaccacaaacattttagctgataaggttgtgagcaaactctattttaaacatacctcttattaaatgtttgtgattgtcactatcatcatcaatattattatgataaattgatcactatgtgccagacacttacctgtgcattttgcatgcaatatatgcatattaatgttatctaaaaattaaagccttataacaactcaatgggttatattagcctctaaactgaggctcaggaaagttaagaaatggtccaagtcgtatccatgatgaatggctgagctgtagctcaaactcagagttgactgccctttctcatgccatattatctccctaaaattatcgatataccttcactaagggccttcaaatggggaccctcctatagaaatacaaggacgtttctggcatagcccctttctctatgaggtggttagtacagcatgggagtgaagcacccaaatggggaccctcctatagaaatacaaggacatttctggtatagtccctttctctatgaggtggttagtacagcatgggagtgaagcacccacccaaagatgaaacacttgtggaggaaagaagcctaataggattggataacctgacagatagttcgaatgtcctacaaaatcaaaaatggaatgaaataccaacttacacacaaaagaaacttgaaactactcaaatggaataggctgatgtgtttttttttaaattttatttattaatttatttatttaagacagagtcttactctgttgcccaggctggagtgcgacggcacgatctaggctcactgcaacctccgcctcccaggttcaagcgattctcctgcctcagcctcctgagtagctgggattacaggcgcatgccaccaagcccggctaatttttatatttttagtagagatggggtctcaccatgttggtcaggctggtcttgaactcctgaccttgtgatctgcctgcctcggcctcccaaagtgcagccactgcgcccggccaggctgaccattttgtatgggaaagtcagcactttcgtgaatgaacacattgatcaagccactgaggaaaatgtgattcaaatcataaggaggccaggacgaaggtcacacaaagagcccctgactctaatctacaatcatgacgaagggggccccagtccagttctaggagaagcctccctgccacatcctgtgacaagtttcacaccagcagggatcttgctgagccagttaggtgggctgagtccagccctggaagatgggccatcctcgtgtccttctgaagggcactggcctgaatgccaagacctaaataaaagcagattttgaaggtttaaacgtggaataaacccaagagtgacccagaggagccagctgaagtgctaatgcaccttcacaatcaaagatatgaaagcttgtcattaattgcgcacgacagtctgaaggaggagggtggagcatcttgctggctggagaaacttctggaaaccttaagtgctctccaacttcagcatccagggtaggtgaggcaacagcaagcctactgactgtttggggtgatgggcttttttttttcctggagagatgccaatcttcagaagccctgagagcctgcagagctccatggaaggtctctggcctaggtgcccaggtgtgggtctgcctgcactgggtctctgaatgagcagggctccctcgcagttctcgtcgtgggaaccctcagaggacacggcaagaacaacgttcccctcagtctctaatggacacggactgcccttcccaggcagaacgcacgcactcgcctgcagaaaccttgagttcaccattatttattatgtctgggggatgctgccatcccctgtgatgcccctgattaatgataatgtgcaaacctgaggtaattcgctgacatgttagatctttgtgaggcaccagaatggaagcggcatttttcaaactctgctctgcgggagccccaggggctgttccagctcaggggggaaggggagggcggcagctcccgcggctgctgctccatttttagctattttatgtgtttatttgtttacaatgcttgttaggattctggatggacaaagaaaagtattgcctacaataaaagaaagaaagaaaaaacaattaaatggaatattatatgctgcaaaggaacatgccaaggggtgcttggaccattttctggaattttccagtactgaatatgcctttgtatttttggttgtgtttttttttaatatttattatatatatttttgaagacggagtctcactctgtcacccaggctagagtgcagtggcgcaatctctgctcactacaacctccacctcctaggttcaagtgattctcctgcctcagcctcccaagtagctgggattacaggcgcctgccaccacacccagctaattgttgtatttttagtagagaactggtttcaccatgttggccaggctggtcttgaactcctgacctcaggtgatccgcccgcctcagcctcccaaagtgctaggaatacaggcatgagccactacacctggcccttgcctttgttttgatgatcgtctgcattcatctgctagggctgccacaaaaacatgccactgagcaggggtttgaacagcagtcatttgttttctcatagttttggaggctctaagtccaagacgaagctatcagcagggtggttccttccaacactgtagatggcacctcctctctgtgtcctaacgtggttgtcctccgtgtgtgtctgtgttctcacttccacctcttccaatgacaccagtcatactggattagggctcatcttgatgacctcactttaccttaatcacccctttgtaggccctatgtccaaataccttatcccgaggtactgggggttgggacttcaacatgaattttggagggacatcatgcagcccataacaaaatctgacaatagttgtatatgcacattctgtaacacatagaacctgtatgatctacctgataggtgaccgctgcccaatttcagagccctcagttttggtcatatttgcgctggtgttaacaccaggctattatctaaggggtcggcatccgcagtctatcatgttggaaagcatggcagccattaggttggccgttattgtcagatggcttctcagccccctcttgatttagttactgcctatgtcactggtggattcccaataagctttgtaattaattccagtacttgcctttgtctattcaaattgtacatgcagtataaccttaaccacctctaggtccaaaatgaatgtgccactcttggtgccactctttgtgcctgcagcacattctgcttttctaattcattctgctctcctttagtttttaaaaagttaagagccgttacctagccgtagctggcaattcttgcttgcaggtaaactgagttgccatggctgctttttaggaaggtctctgcctggttggtgaacagcccctttattcccccagaacaacatggatacttctcctcaaataaatccgtgccccgtatggaccgtccgctttgccagggaaatgggtttgtagcccactgagagggctgacccatatgaccttagcaacaaaaatatgaagtgcacagctgtgtttgcaccatcagcatggccaaacaccctttctcttctcgtttctctccacacagtgatgtgcattaactggcacctggtttctgcatcacacatgcatattgggagaattgttattctagaaggggatggaatgtgacacacctcagataattgctctgagaaatgagtatgaggtctttttaaaaaaactttacatttaaacacacaaaccatttaaaaaaaccactcctccaaaacagacacacaagtgaaacaaaccaaatcgactgtccatccatttaattttgaactatctgcaatatcaccttaaagctctaagctcctaatgattttggtcattacaaatccaaaataacattatttcaaaatgaagttttactatgatttttcccatttgggaaacagtatatccaatacaacaagatgcatgtgtacctccattaaaattttaacaattaggaaaattagaatttatatatgatagattaaaatatgattatttcctaaaagttttctttagttttacgggtttgcttctggattgctttcaatagttattagtgaatttaaaatttgattcagtatgaaggtaatgtacacccatcttcttcagaacacgtattttaaaatgtgacatcatctgttctgagtctaagcactgaagaatgaagtgtccacattcaccgtatttatgcacagacacattctcattccattgacatttaagtgatgtaatgaactaaaactgccacaaagagaggagggttgggaggctgagctctggacagctctgtcactgggcaagtaacatggtgtttagaaaatctctgctcctttctgtgccattggtctatatctctgttttggacaaaaaaccaaacaccgcatgttctcactcataggtgggaattgaacaatgagaacacttgcacacaggaaggggaacatcacacaccggggcctgttgtgggatggggagaacggggaggaatagcattaggagatatacctaatgtaaatgacgagttaacgggtgcagcacaccaacatggcacatgtatacatatgtaacaaacctgcacattgtgcacatgtaccctagaacttaaagtataataaaataaaaataaaaattaagtaaagtaaaataaaatctctgctcctgtttgctgtccccactgataaaatggtagagcagatcactcctaagtcagagcttgtgtaatagctgcgtaggagtgtgaaaccaggctacttgggagccagtgctggctccagaactttccagctgcgtgtccttgggcaggtggtttacactctgttgcctcagtttctccagcaataaaataagaaaaaaatcatagccagctgatcaggttgttgtggaggattacattattaaatcttggccaagccctcggagcagactgtaaccctagtactgtctcatgcataatcagttactgatgttgttttaaaagcactgggttaaaattgctgcacctaagatctagaacctgccctaccactgcctagctgtggtggctggaggcatagagccccatagttgtggaaggaaggagtggccccaaaggcctctacctagtgaagttcacttccccctgcttccttccctaatgtggtttcttagagttgacataagcatatttctctgacacacaaacagatgactttttctgcaggattggtcagaactttagaagtaaagtgctcgagttgatgagataatttgcagctaactgcttgaagttcatgttggttatgctaaaccttagagaaagaaagctaccgtttctgaatctttaccacttatgtttttatccgctctgacacattaaagggagaaaaataccagtaaagaaatggctagagaaaatggaatatgacagctagggtctagggaggaaaaccgtgaaaatgtctgtaatgaaaagaaaattgctagacaaaaataatttgtaatttgtcttctacatgtggcattctaagactactgaatcaatattgcaagttctttgttagccataataatagtaatttttaataaatgcccaggtgaggtggctcacacttgtaatcccatcactttgggagatccaggcaggaggatccctttagtccaggagttcaagaccagcctaggcaccatggggaaaccctctctctacaaaaaatacaaagattagccatacatggtggtgcaaacctgtagttccagcttcttgggaggccgaggtgggaggatctcttgagctggggaggtcaaggctgcagtgagccaacaatcatgccactttgcacttcagcctgggtgacagagaagactttgtctcaaaaacctaataaacaaaacacttcaggtgcatgactaagagtaagcttcgtgttgggctcaaaatgctgttcagttgaaggcgctggagaagagagggcagaaagctcttggactcttggacagcctcgcagaagcaaaccttgctccaatgagggaggcaccaaatggcacaggtggctttggcaggacgttattgtaagcctgccacgtttccgtggcatacagtttaggatccaaggttctttaatattgtgtttccatagctttttcctgcaaggcagacacgtaacattaatgagctcacagcactcttggttttagtcgtagttactgaatcctcattggctgaaaagctttgtgtattaagttacacaatttttttcttttgcatccaaacttgaaataaaacataccaatttgattattttatattaattataacatgacttacgtcattgtggtttattgaggttaaaaattgatgtgctatactcagaagacagaaatgattattaagataaaagaggcccctgtaattctatgccccagagattaacattttaaacatgttggaatagatttctcctttcattttgcagtgaaaatatatgggattacattattctaaaaccgttttttccactgaacctattacagcacttttccatggactacatatgcctcattgttaaattttttagtcaaacactacatgcaaataattttaatgtcatatggttataaagaaattataacaacaaaaaactgagaatgcattccccgttttcctcccacgaagaaatcactctcattattttttaactaaatttctggtatttaatttttttcaatcttattcatgtatttattgacttcatattgtgatggttcagaaatttaggtcactttgcccatattcccatcctcccagtatgtcttacattttagttaaatctattataatcatgtaaatattaagtgtcaagccaagttgtgtgctatgattacatttttcctttttgctttaaacatctaacatttccacacttcaaagcacaaaatgattttccacatgttcaactttgtcagggaatttattctattttgtttttccagcagagacagctccaggagcccctctaccagcctccaatctgaaggggctgccaccttaagtattcttctcatgtctcccctatgctggatttcctatttcctaaatcctgtgctttcccatgtctttttttctccctcctttcagcgggacataccatccatcatttctgagaaaggatgcatgagaagaacatttttaagaacttatgtttgcaaaaagaatataagtttggaagtaatttttatcttagaaattttaaaaattgcaaagggaatgatttctccattgtcttttagctgccagggtaggggttgttatagttctgattgctgaccttcgggtgtaagttcactttcttccttttgggtgggcagtgttgaggccattctctttattcctgaagtcccgtaactttatgaaggtgtgtgtggctgtagtgtgctgggcactgagtggcatcttggaatgcaaacactcctgcccctcaatgtagggtgatttccctgtatttctttatggatgataccattcctactctttccacctttctctcccgctggaatttctactgttcaaacagacctcctggatggaggtaatttttttttaaatctttattattttgttgtacaaatctcctcctttttgacagttcagaaattttcgacttttggttcttttctttatactaactttcagaaaatatctacacttccatcttaaatacccaataatctgtttcagtttagccagagaataaaccccttaggctatcgagatgcttctggaagcagcataatgtgcagctgaatgtgcaggcggggcacgaggacgcagaatttcaggaaacccctccttgttcagcccttgccccactccaaaccccaaaacctttgaggcctccccctccccaatcctgtgtgcaatatttgctgtttttccatttactccctgacttcagattgttgagcttgagttcatggacatttcatagtaaccctgaaatattataagtctctgaaatagtgtatttctcttcctttctcttctcgctccttctcttcctcctctctctgtctctgctatgaaattaactagtttcttattacaaaccaaaaagtatctcagacaggtctcaatcgattgaggaggtgcacccaggacacaggtctgtgccttcctccaaagatgattttgagggtttggggatttaaaggagaaagggcagatattggggaaagagaaagagaattttaaatttcagtgaatctttatttttacataagataaaataaacatagggcagaggaagcaaatcagatgtgcatttgtctcagatgggcagaggaatgactgagttctgtccttcgtcccgcacctgtgaagataagctatcaatttatctcgtcagggtgaaatgcaacagaactattttagggtaaagatcttggggcccgcaaggaatttcctagtgggcaaattgtgagggagctatgtagtttttttttttttttttttttggttaatctttgtagctatcttattttggaataaaatgggaggcaagcttgcctgatatagttcccagcttgacttttcccttgggcttagtgattttggggtcccacgatttattttcccctcacataattgatgacattttagtccttattcctttacttttactatttttaaaattgcttataaaatcccaatatttgtgtattttttaatcaattcttagataagttactgcttactataaattcgtgtacattttacaatattccatattttaacaaattaccctcaaagacatatcaaattattaagtttcatttctggaaagtatgtataaaagtgttgattcttctcttacacttcctgacattaagcgttattttttaatcaattttatatacaagtcaattttatgccatcattcatacttctaaatacgtacttttagaaagctacatattcctgaaaacagaacacttattctttccacacaaaatagtcatttgaaaacttctgcagatatagacaagtaagtcataaaacatttaaatgtgtttacagagatcaagactaattattttgtagattaaatctttgtgtgcgtgtgtgtgtttaagaagattgtggggattaaatcattgtgtatatgcacagtgtttaagaagttaatgtgctggaattaagaggcaaaggcaaataaaattgtttctaaaaatttgtgacctatctttgtgtcagaaacagcttatatttaaatttgttgtttctataagtccacttaattgtcttgattgtttaaatacaggtagagtaataatgatcaaaatctgggagccctctggtggccaaaatatctttagctacagacatacatctttggcttatgttctaggttctcaagatctagttattttaaacttcttgaaagtataggcatttaaaaataatcaacagatgaacaaagtgaaataaacaagaaaaaaatgtaattgcattaggaaaacaatgtaaatttgaaaagtgatagccaggttcaactcagttcttgtaagtgtttttggaaactggcaaaaatcaaatgcatgtatttgtccgggagaagccacagtatcattggaaccttgtccactctcagcaatgcaaaagccctttgaggtggtcccatagaaatttataacatgttaccctcaatgaagtgaaggcatttaaattggaggaaaaaagaaaagaggtgtgttagctgtcttcagaggtcagaagggattctttgtcataggatcacattccttacctggacagtgcagggagaaacggaagctgaaaaaacaaaacaaaacaaacaaacagtttcaagtccatttaagaaataaattattattaaaaactatttttaaaaatggactgccttgataagcagtgagttgcccatcactgtgagtactcaagcagggagatggaaacacacttgttagaattgccatggaggggactcaggctctcaagcttgggtctaaagtacatggtctcttccagtgctgtaaccctggggctacgtggatcaacaatcaaccatcaggtaggaactgttgatggcctcagagcctgtctctttaaatcagagtttcaggaatgaaaagtgatattggcatgagaggtcttgggtctagacaggagtgaatgtcatttgtctcaagttctaggaggggtagatgtatccagctgcatgccgccttacttctgaagggataaaagcagagatggcttctgatctccagcaactccttagttgttcataagcaatgaatttagaatcacagatgggaccacacatatgtctgtgggatgctggcgtttctttctgaacaacagttccatttttattgcactccttgtgaccacatctgcatgtttcacagtctttttgagatttttgcaggcatgattccgtcacccaaaacagcaaggatatgctactcttatttctatgccttcaaaaacaaacagatctgcagatttgacaaccttgctgaaaatattttttttttttttaccaaacgtgtttataatcaaacaagttgtcagaacaaggggtcattgttgctttctcaagtatttcaagagtaagctgtaatggcatttggagagagaatataattttattctctagaacaggggtgtccagtcttttggcttccctggggaacattggaagaagaattgtcttgggccactcataaaataccctaatgatagctgatgaactaaaataaattgcaaaaatgtctcatgttttaagaaagtttacacattagtgttgggccacattcaaagccgtcctgggccgcgggtggcctgcacgccacgggtgggacatgcgtgctctaaaggaaatgagatgaatggctcgtctcattatttttaatggaacagagcttctgtagttgatctggatccatttgaacaggtgatttaacccacttgggtgcctcagtttactcatcattgaaggtaccttttcacatgcagttctatatcaaatgttcaaacagagcttttgggagacgtttaagctcagacctgaaagaagagaaagagccgctcatgataactggaataacagcattgtggggagagagaaaagcaggtgcaaaggaggccaagaagcatttcatgtgtttcgtgcagcaaaaggacaacacatcccaagccaagtagtagaaggatagattgatgagaaaggatgttgaagagacacactgatgccagatcttgcaagatcttatatgtacatgaagggaattgggatcttattttagtgcaaagacgagccacttttaagcattttaaacagacgaaaacaattttatttacatggttcaaagatggttctgggccagatgcggtggctcacacctgtaatcccagcacttcgggaggccaaggcaggcggatcatgagataaagagatcgataccatcctagccaacgtggtgaaacctcatctctactaaaaatacaaaaattagctgggcatggtgatgtgtgcctgtagtcccagctactcgggaggctgaggacagagaattgcatggatctgggaggcagaggttgcagtgagctgagattgcaccaccgtgctccagcctggcaacagagcgagactctgcttcaaaaaaaaaaaaaaaagatggttctggggagaatgaattagtgacggaacaggaacagatgcagagaatccaggtgcacttgggactgaacagggtggctctttcaaagatggaggaaagtgggtagaagtcggatatattttaaaagtgggctggacaggagtaccctgatgttgcaagtgaggaaaactgaagagtcgcaatgactcctgttttgtttttgcttggacagtgcttgtagatagaatgaaaagcaatgcctttgtgtgtatgggggttctaaagtgagggagtcatgaactgaggctcagctttgggaaccttacatttaagtgactgtgaacagtttctaccttcctctgagcctgttctctatttttccccattgtactcatcactttctaacatgctacctagtttatttatcttgtttattgtttcttgtcaatctccctgctccacctgctccctgctcctgcattgaaaggaaggtccatgtgggcagcgatttactgatttacttttattgatgttcccagaacagtcccggagcctccaaggcattcagagaacctctgtagaggtgtgaaggaagcagtcaggctgcagagttcaaaagagagacttgggagatagaaatgtgggagaaattcatatgtggatggtaaaatcatgaaaatggatatggttacctcaggaaagagtgtgcagatggttcaggaaacagctggagaatctctagttgatgtttggaggggaaggatgagatggcaaagcagaaccagcagtgggcattttatcaggtgagaggttagagggggattgtcctagaagccaagaaaagagaggaatttcagaaaaggaggtgctcaccttcagaggtgctttctagtgaagtatgaggtaaggccaacagttgcgggatgggtgtctagggatgagaagacaaatgatggagctcagggaacaagaaggatgccaaagaggctggaagcagatgttaatgatggtgcagccttctggaaccagcctctaaggagcaggggtctggacctgcacatggatgggtggtgccaatctgtgatttgaaagccagcatggggaccaaggatggaccttctctttatctggtcctgatgaaggtcaggaagagcagcagcctatgttgcaaaggatggggtgagattgggtctacagaggatgcccaagtttcagttaagacctggggaaagtggggatgatcagagcctatgctgctgatattggaggggaatttcagagaacacactggaagaactgatggaagaaggggtgattggacaaatgagcagacattcagtgcaataccgggtggtctcggtatgagcagtgaggcttgcatttctgatgctgattgagatggacagaagaatatcagggcactgggcatagttgttattggatgttcagctatgtccagctcaccacatgtgatttaaactaggcatttggggtttatttttaaagtgcattttagaaattcccagataactccttgcttgcaagccattatctagtaggtgtgcaataataatgagcttctcaatgccatcattttagtatcctaaggaagtatattacaatgctcgttattaggctgaataatatgaaattgctgttttatatgtcaaatgtggaccaatcaagcaatttcagatggttcaacctagcactccttatagcagaaagtatgtcaaagaggaaatagtagcaacaattgcagtgatacaataaatcaactcttgaaaatactttgaactatatggaataaaaataagattaacatttctattttgcaaagttgaatatcagttgacttttcagaaatgactgggggttgggaaatgactcttctcctggcccccacatttaccatgtggcacctaactctgatcaggtgctacaagtgggaattctgctctagctttcaccttagggttgcattagaatcatctagggattaagattcctgacactcaggctgtaaaccaatcaattagatcacctagggatggaacccaggtatctatacattttaattggccctgagtggtttcaatgtatcaagattgagaactattgctctaaaccagtgctttcaaactgtcatgcatatggttcacttggggatctttattgccacctcccctgcctaagcattctaattccatgggtcttgggtgcaacaaagatgtgaaaattttttaaagatctccacgtgattccaatgtgcagtaacattttggatgccttgctcagtctaaaccaagagctacattaagccagcggttctcaggcatgcatcacatcaggcttacttggaggacttgtcaaaccagagtgttagccatggctctaagatttttattccagctgccagaagatgggtccaagaatttgatttgctaacccattctcaggtgacacttctgctactggtcttggtgccacatcatgagagcctctgtaccaggctctaatagaagtactcttgggttcctgtttgtgggtggtatggctgggatctcctatattccctgcatgaaattttcttatctgaacttgcaggaaggagttccaagaggaaagacgtgggttaaaaatcccatctgctccctactgcctccttatcttcctgtggtcatttttctattcttttctgccatattcatttcctgctgctgctgctttaacaaattagcacacacctaagtggcttaagacaaagttattgtcatactattgtggatgtcagaagtccagagcgttaaatgctctcagtggtctaaaattaaggtgttggcagagctaggtccctttctgggggctctagagcagttctgcttgagtttcccagctttttgagacaacttgcagctcttgactcacaatccattagtcccttctctctgcaaagccagcaatggccattcaagtctttttcacattgcatcgccggctctgatgcttgcttccacttttaagaactcatgattaccttggacccacgtggataatccaggctaatctccctacattaaagtcagctgaggagcaaccttaactcccctttgccatgaaaccttacacattcacaggttctgcggattgggatgcaaacgtatttgtggggggattgggacattattctacctgtcacacctgcctccccccagaccccagagctggaatgcttgagtgtgaaaccagctctgcctcttagagctgggttacctggagcaggtcatttaacttctctaaactgctggaacccagggaaataaagtatctacctcacagtatttgtggcagggctacctactgtgggtaatgaatcatatgtatgtgtgccaggtcctggaaaagggattttagaaaatgttattattattgttataatgttcatcttttgcaattgtattaagagtttctgcctatagtcacacagttcctcatttcataggcaaacaccagtttctcgggtatcctttcagagctactctatgcatgtataagcatatgcaaatatataatttatttgcagaagtggtaaagtattatgcctatgtgaataatacttcattcatgttttttctttcttttaaacagctgcattgttcctattttatgaatatacttcatttacttagctagcctttattgatgaatattttgtgttcaattcttttgcaactatgaacagggctgtaactgatagtcgtataaatcaataagcttgcatatgcaccgtatatctgttgtataaattcctagaagtgagtcttctgaatcaaaggttatatacactttaaacgtgtgatagatgttgccaaatttgtctctgtatatattttatccattttcatttccatcagtactatgagaatgtgtatttccatatctctttggctgattcatgtcacccagcattattatttctgccgttctgacagttgagaataacatttcatgttttttatttgcatctctcttttgaagaaaaccagcatcttttcacacatttcttagcaatcatatttccttttcaattaactacccatttatgtccctcatccatcatgtttttgggtggttgatttttttctttaatggataattaataggatttactcacagtttaaggaaagatctattttctgtggtctaaattacaaaacattttcctactttgtttactttttgcttttgctgtaaataattattttttatgtggttaagtttctaagttgtttatggaatcataattttgtatcatactcagatctttgctatcttaggctacagaaaacaaaatttcccatatttttgtctaataataacattattttatgtttgtcatttgtatctctggaacttgtttttattttttatttttatttttttcttccaactttttaaaacatttaatgatattctattttaagttctggggtacctgtgcaggatgtgcaggtttgttacataggtaaatatgtgccatggtggtttgctgcacctatcaacccattacctaggtattaagcccagcatgcattagctatttatcctgatgctctcctttccccaatgccaccaacagtccccagtgtgtgttgttcccctccttgtgtccatgtgttctcattgttcagctcccacttataagtgagaaaatgcggtgtttggttttctgctcctgtgttagtttgctgaggataatggcttccagttccatctgtgtcccagcaaaggacatgatctcgtggaacttgtttttatttgatgaattcgataggaatgcaattttagttttttccacaagttccagttgcctcaacaccatttatccatacttgattctgtttttcctaccgattgctaccttatttattctttttttttgggtggggggcaggttttctttaaaatctggttgtttttgcatgtttactttaaaactggattactttgctggagaaaaaaatatctttcatattttgctagagttgtttgaaatatatagattaattcatgcattgctttctttaggatattgtgttcccatcttaagtagagtctgcattccgcttactcaatggtcattttgtgtagtaaagaagcatttcaacgtgctgttcatatggtttgtacacattttttatacttatgctttttgtttctattgtgcatggatcttggatctgaaagcatgcttctttgtacatacttaggcaacctatttactttttactttttactcagtcacttcactgaattatctttaccatgtctaagagtttttccattggttctcatgaactttttatttatacagttatattttgtgcaaacaatggtaatttcctttcttttttaatatgcacagttttaatttccttctcttatcgaatggtatgttctagcatttaatttcatcactatctgattcattccctgttctcatttctaattttgttttgttcttcttttcttgcttagtttaatcaacaatctaatttttatttcaaaacttttgatttatttaatagctctaacatcattctgttttcgaatgcattgattcttgtgtttatgattttattaacttgttccttttgcttttttgttcgtattttattgattttttttctagttcttttagttggatgcttatgtcatttattttcatcctttcttgttatttatatacgtatgtgtacaagacttaaaatgtctcctgagcattgcttttaacattttacctaggttctactctcatatataacttttgtatatgttctccagtcaccgttttggtttcctttgtgattcaagagtgaattcttggtcataaatcctgataagttctaactttgtggggaaatatttaatgaacttctctttgtgacctaacatgtcttcaagattggcaattttttccttgattgccgggaaggaatatgaattatctgtccttaggttacagaattaggtaaagtacaaatagatctaactatgttgtttaaatcttcattatttttgcttttgatgtttaatcaacaatctaattttttatcttaaaactttacatttacttaataggtctaacatgattctgttttcaaatgcattcattcttgtatttacgtttttattaacttgttccttttgctttcctcatgcatattttattggcttttttctagttctttcagttggatgcttatgtcatttattttcatcctttcttattatttacatatgtatgtgtacgagacttaaaatgtctcctgagcattgcttttaacatattacctaggttctacttcatatacaacttttgtaaatgttcttcgatctctggttttgtttcctttgtaattcaagagtgaattcttggtcataaatcctgataagttataactttgtggggaaatatttaatgaacttctctttgtgacctagcatgtcttcaagattggcatttttttcctcagttgctgggaaggaaggtcaattatctgtccttaggttatagaattaggtaaagtacaaatagatataactatgttgtttaaatcttcattatttttctttcgttgtatactgggtcagtcatggactgagagatgtgaattgaagtccctcactattgacatacttctgcctatttaaaaaattcttgtaggtttcactttattaaatttgatgtaatattttcatcgtgtgcacatattcatacctcttacatgtttattgctgagtatatgcttactcatcataaagggccatgctttgtcacaggaatgctttctaccctgttttaactgtgtctgctactcagaacatggccatggctttcctttccaatttgcctgatttgcctttccacattattaatatttgatatttgtaaatactttaaaacttaccacaacaatgtatagttaagtttgtggtccaaagggaggcatatgtagcacattcacattgtaaatatcatattttacgttattctttctctttatatctttattttgcattttcccctctttttctgtgtaagtgtgtgcaatatttcttttcataatatgaaaatgtgggatgtttttagtttttataatggctaactctgtaattacaaattgatataatacaggtttttttgtttgtttgtttgtttgtttgttttattttattattttttttgagacagggtctttctctgtcccccaggctggggtgccgtggtgcaactgtggctcactacagcctcaaactcccgggctcaagcaatcctcccgcttcagcctcctgagtagctgggaccacaggcatgtgccaccacacctgactaactttgtatattttggtagagatggagtttcaccatactgcccaggctggtctcgaactcctaggctcaagcaatcctcccgccttggctttccgaagtgctgaggttacaggtgtgagctaccatgcgcagccagccttcttctttttccaaatacagtgtcaacttcccactatggccagagatgaaattataaagtattctaagtatgccactccccaaattaacttggttatatttttattggtttttccagtatttatatcttgattaattgatttatcaccattaaagaatctatttgattcctgtataggcatccctctatcccttatctctcatcttctttgtcctatggacttttgttacagtaattctaaattgccatgatttacaattgatttctgtacagtaatttccacagatattttactcctaatactatagttaaatagaataaatgtggagagacaatactttgctatggttttgtgatttttcatcattttattatgaaaagtcataaatatatagaaatatgaaaataattgtattgtgagcacccattaaccattacctggattgtacaatcaatatatgcaatatttgctttacctattagctatccatttagtgacactcatcattccattgtattcacaataatttttgtattgtgtattcacaataatttttgtattattgtgaagtgtattgcacttcacaataattttcagatagcaatcgactttacctttgaacacgttagcatacatatcgttagctagagttcaatattagtggtctttcctcattttctcattagctaattttttttctgattgtcaggaagattttacagcccctgcaattcctgcctattttcccatttgaaaatgtgacctgtaatcatataattaaatgttattctgcctgggtataacattttgttttcttgagaatttcatagatgttatcccaatagtttcataagtagactgttactgtgagaaaatctgagattggtgtaattttaatttacttttttttaagtgaactctaaaaaattttttttctaattataatttatctacaaaagtccaattaatgaaatactaatttagatacagttcttgctaaatttttaatatcaactattcttagggcattgtgatcattttcatctgcatattcaagccttcttgcaatgatacttctctattatttaaaaaaattatatttaatacttttttctttttcttttcttttattattattatactttaagttttagggtacatgtgcacaatgtgcaggtttgttacatatgtatacatgtgccatgttggtgtgctgcacccattaactcgtcatttagcattaggtatattaatactttttagctcatttatgtgctgctcttccccgagcacaccagttatgcagattttgaatctccttgtcttcttccctgtctctctcccttgaatattttttcctatctatctatttatcatctatctatcatctatcaatccatcaatctatttatctatcatccatgtcgtttttttgttttgttttgtttgttttttgagagagagcctcactttgttgcccaagctggaatgcagtggggtgatttcagctcactgcaacctccacctcctggattcaaccgatactcctgcctcagcctccccagtagctgggatcacaggtgcatgccaccatgcccagctaatgtttgtatatttacagtagagacggggtttcgctatgttggccaggctggtcttgaactcctgacctcaagtgattcaccagcctcatcctcccaaagtgctgggattacaggtgtgagccaccgtgcctggcttggtttatgtttctaatgcaattcttcctcttctggacagtgtctagtttctttgggttgattacaatatggcaatcagtttttttattttttaattccctttttttctttcaagtattctgatagcttatattccatctttctctcgtctgaacttcatcttttacctctgctctgagctatttgattgcttcattcagttcttttcattcatgaccatacatttcgttcaaatgattcgtcggctcaataactactttttctggtggagcattatgttccacttgtttttccagtgcttctctgaacctggtcttacattacattgatatcaatcccatgctgggagcttcttgatctatgtctcgctttttggtggaagtcttcctagatcaggtacttgcaaaaggtttatttggagcggggaaagcataactagattagtaggagtcatcccccatttacagggaagtaccttctgatatcaggttacatttctgtgtgagttgttccacttcacttctctccagcctaccaaggtcagcaggttgtgcgcagtttgtgattctgaggacctctgcctcacccattcttgtggacgtcgagatagaatttatctggccctgcctctcctactattttatggtgccacacactcgaaaggagaggtacccatcaccaaagtcatcaccaaagtctgtgattaagccattggtagtgtttcctctctgtatatttaccctactttgagaagaatgcttctgcctgagatactgcagagaccttcttgtggcgacttctacattttcatttgatttcccttgatttgggaaggtgatttgcatgtacggaaatcacttagtttttttcaaagatgaattgtataaactctgcagctattaaacacttccccgtgtgaactctttgcccatccttcctcttcattctagaaggattcctttctgttctatatagtgcctttacattgttatattgctttttctgctttagtcatacattttttaaagtgggaaaattgggtaattgaaaattgagtgtttcagagtggtcttcacagaaaactttcacagatatggtttcatttcatccttttgacaatccttcaatttgggcattgtaatcttcatttcacagaagaacaaaagaaactcagagcacatgttatggctaaagccacatacgaacacgtgactaggctgagtttctgacaccttcattgtttcattatactgcctttcataactgggaatgaaacctgaacagtcccctgaacatggtgagagtttagacatttgatatagattagaaaaaagagaaaattgccctgattcatcatgagcagactttgccatggtgacagactgtctaattggcttatatatatctttctgtttcagtccgtaagtttgctcattaggatgtgtttttctttatcctacctaggcaggtatttggggtgtactcgtgaaccttgttcccatgttagggccctgttggagagtagaatagtttcatgtgccaggcataggcccagccaaggacatatcccctgcttcgatgtacttacacacaatggatgcctttgctgattcaagggccaaggctcttacttccttttagtcttgttagtgactaattagttcatctcctgagcttttcagttagaatacttttacaggagggcagggactgtttgtactttatataacctcagtgcttcaagcatttcaatataaatgtttcttaattgaatattatctgttcttaaaagaagagttgtagcactttgatgttctacttttgtttatctcttgtcaacagcagcaaatatttattggcattagtactaagcaatgctcagatggatggtggaattgtcatcctaaggtgttggatcaggacatgggcagtggtccccaaggatagctggaaaatcgttgagggtaattgaagctttctgggatgttttgcaaatgcaaaggaaaacatgcattttgttgttgcaggcgttttgtgcattgaggacataaagtcatttgcctgtcatagtgcagaatctgtcaggattgcagctgtcagcttgtcagtgtgacctttcctagtgtgacataccatggaattttatgtcatgctaggacaatatgacaggactgtgcattgctttttcagtagatctctccatccttatcttctcaagaaagaatacattctgaaagagataagggagtacgcttatcacatattaatcctataaagtcagaaagcagataaaaaggttatacattaagcttgattttatgcagtaattcacataagtgtgtgatattacttatgtgtgtttgcatgtatgtgtagatatacacatatatctcacacacacacacacacacacacacacacacacacacacacacacacacacaaagtctttaaaattcaggaaccagagaggcagccatgtttctgtctagcagcaggcaaagaaagactggaaatatccaaactcattttaaatgccattctgaacttaatatggaattacctaattatgtctaattcaacaactgaagcataaactactgatttcagcccaagccagaattttacagatttccctattttcctgtatagaatataacacttggcacaaatcctagatcacatcttctttgcagctattaccaaggctctatgagccttggtagagaatggtttgcatcatgcactaaaaaaaaagcaactaaatcctaacattttgagtttctttttttctattggtagggaactctcacagacgttgatatcacataacctagtagcatcctgcttgctagagcatgagtgctgtattgtatgctttatgaaatagaatatagaagtttgcttgatactatttggcaggtaatatattttatactttgtataatgctaataagttattagagtaactgttgaaactaaactttcaattgaaaaatgtttacgagcaaaacaagaattgcatacgatatcactctttaacttcttaacttcactaaatatcataaacctctttatgtcccgatgcacacgtttcctgaaccagcttgtaaaaggtgtaattgttcagaaatcagatttgaatactcagttttttatttcacaagttagattgatgcatttacagagtattttccaggatacctccaggatacctgtgtgtgtgtgtgtgtgtgtgtgtgtgtgtaatatagtgtatacatagtatgtatatactattatagatattatatagtgctctgtatctatatatagtacatatagtctgtgtatctatacagtgttctgtatttttcattggatgtatttttctccacatttaatcatcttgattttgtgtataatgggtaggaaaaattatttttgaaattctcctggttgaggggcctatcggtacttcatagtcccagggaggtaatcaattggaatctttcagcagtagcgctgactgttgagggacccttctgtcataaccagtatccacagtgaactgggaatacctccttaaacccatttatgctggaggttgcaatttttttgaatttttgcgtcagtgaaaaatcagactttgatgatgaccttgagcagtaggatataaataactcccacatgtttagtgttccaataatggaacacttgggtattgcattgatgttaataatccaaatagtttctggcgtgcacacatcctccagccaccctgaaattcgaaccctagtgatttgatttatttgtacacttctaggcagtccaccatgtgttctggaaacagttgcggctaaattactatcattgttgtgctttggcacatggatgtttgatgcaactgagaaagcaattttaatggaatttattctgacagctatatatacctggtgcagacttaatatgacatgatacgagccccacacacctaattgtgtaggattcttatgaatacatcacatggatacaaaaccaagaaacactcaattatctcatgtgtttgatgtggaaatttctttactaccccaagtctgttacctttcataaccattaaagcagccccactaatctttttataaagatttatgtttcattcaaaaagaagggatgtctaagccagtagaaagtgccatggggagctgggccataatagtaagtgctctcctttcattaaaatacctcctgttcttttttataaatgctggagactggccttctcttacattgtggccctttggagtctgaacaacttaacctcagccatcaacaggcgatccaaattccagtggggcagagcctctggatgatggggctgaatgcccagagatgacttgcaaagcatctcggaaatctttggccttcctgcccccaactccactgacgtgcatgcttatttgtaggcctgcccttgaaggacaaggcatacagattttcatccatcctggaatggtccagccaactggccagaatgcccaccaacagaacatatcttgagcaggagggtaggtgacctgcagagattcacacgtttataaaataagattgaaatcctaagatgcaaaaaagaaacaaatagtactgttcaatcgttactggaaattttacatatgcgttccttagtaagaagcttcctatacatttcttttcagagatatagtaatgtctgtcattaaaaagcagcaacaacaacaaaacttacctttgataaagtctcagtatattcaataacaatcatatgtaacatagaccctgtgagccctgatggcttagataaacttcatgcctatgaaagataaaaatctcaaacatttgcaagcaaattttatttctgaattaaaacctatgttgtaggctgtgaatatgggcaattcatcaaatgttctgaagtcattgtccatgaatcctaaatcaagggctttatccctgtaaatatttttttccaaggccatcaagcttgtgtttctgggtaaataacattttttttcattactgaaagcaaagtgctgagtttcatgtagttgtgaatgaattaataagattgtggccagaatttgaaggcaaacagtggtacatcaaaaacatgtgggatctattttcaagtgtcagccaggactagaacattttaaaaatctgtacttgacggcctcttcagcaaactaaaagtgatttgttctgctggttttcccagtatcaaagcaagcaggaatcttcagatgtattattttatgttacgttgtttggtttggtttataaaggtgctattgtgccatggtgtgaagaaaatttttttttaaatgagtaccagagtaacttgttaaccatttcctgtatagctttctaagacttttcactgcatattgacatttatgttgatgtgtatggagaaatgtcactgaacatttcattgagtttttctcctgtgtatcccaaggcagaactttcttaaaagaaacacaaaaaatcaaatgtaacatattaaattttatttctgcctttgaagaaatattttaattggcttatgtattgtggatttggccatcaactattataatgtatagaattaattaaaaataggcttaaatcaaatatattaatgtaattgtgaaaattcctatgaggtacagtatgcctaatctttattaagaaatttaagactgtttcatcaaagaaactgaagaagtttagaagtaaaaaagatatatagatgttagctcttctgattaccttggctcaatgttttcatgcttttatcttcaacaaaaactgccaccagaagaacacaggcataagtcatatgatgcagcagaactagcttttaaaataactgcttgattactgtttagaatatagcattagacaatacatcatagatgactcctgaaatcacttttttggtcacacatcaacatctgtgggaggtacaagtttattttgatttctaaaaagtgaatgtaataactggatgttttcttttcatctttcatttctgagaatacaaggatacggattagtgtcatgcatttacaatttcacattgtgggatgtacagctcttacaggtgaggaatatacttgagaaatagtcatgtatataaaaatattgtgatagaatgatgctcccccaccaaagatgcctaacatcctaattcccaaaacttgtgttatgttacattccatgggaaaagggaagtaagggtgcagctgcagttaaatgaccttgaggtagagagtttatcctctattatccaggtgggcccaaactaatcatatgcatccttaaaggcagaagacctttttcagacatagtcagagggaggcgtgactacagaagatggccggagagagtctatggtgctgaacttgaagatggggaaaagggccacaagccaagaaatttcggcagcctctgaaagctggaaaaggaataataataataattttctcttcagaggcttctgtataaatgcagtcctgcccaccttcatttagttcagtgagactcaagttcaactcctaaccaccaaaagtataagatataaataaatgtgtgttgttttaaaccactaagtttgtggcagtttgttatagcagcaacaagaaaacaaaataaatatgaacaagatttagccttttcaccctccatccagagacaaaactctcataattatatttttgaattgattttgtgagaatatactcctaaaaacaaaagaaatagattttgtttgcagcatacattaaagtactccagagaaatcagagagccagtagaagattagataaagtagatagataaatagattgatttattatgataaatattattgatttattattgatttattatagataaatagattgattattatttattaggaaggtcaagcagtcccatgatcatttccctacaagctgaaccaggaaagctggtggtgcgagtcagcctgagtctcaagatttgagaaccaggggacccagtggtataattcccagtccaagttccagtgcttgagaactggggggccactagtgtaagtcctagagtccaaatgtcagagaaccaggagctgcgatgtccattgcaggaggagacagatgttctagctcaagaagagagaatgaactcacccttcctctatgtttttgttctatttgggccttcattggattggatggtgtgtgcctacgttgctgagggccatcttgtttactcagcctactgatttaaatgctgatttcttccaaaaacatcctcgcttcacagacacatccagaattaatgtttcaccagctatctgggcatcccttagccagtcaagttgacacacacaaaatcatcacacacaataaacagactataaaacacagttgatttccatgttgacctattgagggaagttagcctttatattgaattttattcaacatgtacaagaaatgcttaattttattaggctaatattataacaactgtagaaataaatatctaattgatcaaaaatgccctttagcaaagtaaattggtcttgaagaatagagcaatcacataaaaatagaacttaaaaattccaagtaggtttgaagttgatcgatataagcatcacgctcctcctcgttatgctgctatattttgtggaacacctaccacagataagctgtctgatttaggagaaaaaaattaatgtcattcaccaccaacagaaatgtgcttattctttcaaaatgattattgttgctgaaagtacaaatgtattgtattcagagttgccataaccacagtaaggagttatgttgcatgatgaatgtgtttttttattagaaaaaccaagaaaaggaaagtttgccatagcatttcgctgtgtaaattagaatcagtctttccattgggtctggaatgtctgaaatactttttttcctaatttgagtaatgttttgtgatcataggttactcttacacactatagccttggatagaggtggttcattgttgtcaaaccataaagcacacgaacagtaatggtacccagaaaagaataaatatttcagaggtttgtgaaaaatacaataagtacattttagtttgttcgtggtctttacttatcctagaccttttacaaccaaaatgagtcatgggacttttagaaggaaattgtcagtgttaggttttgtgatggtaatgcagcaatctccaccttccatgatgcagcccatgcttgggtatgagactgtaaggagtcgagtttcattcacctacatgcccaaccttagcctgattagtaaatcctccaccctgaggaagaaatgttcattggtgggttccctacagtgacccctgtgctgctagggaagggatctcatctgcatcccacaccatctctgccagagcatgacagaataagcacagcacaggaacacaaggaggtgaccaagcgggagggcaccttggcagacaggctacctcatcagtagaggagacattggggtcttcagcatcactcaatcctgtctctatttgtgagtgtaccttgtcatctttgctgcatttggggctggccctgtcattagtatttccccaacaggactttgaaagtcatagggatttatattttcattcttaagtactatttccaataaaagacttctagatttcttagggaacatgtggttgctctactttaagttgaaaacagatatgtttatttaatggtagtcagtagaattatttcctttgaggggagagccataaacctgagttgctgagagtgattcttaaatgaaattcactttgagacttggccagagcctgttctggccattgtaaaccacacactaaacacatttgcttttttgctggttttaatattgacagaaacactgactgggaatcgctcttccttaatgcagttgatccttcacttttttgcagagggggccctgggtgcttaacggaagataaactggaaggatactgagtggggtctgaccagcaaagcactgtatgcagtaaagatttccactgacaacatccaagatgggctgacattccttgtgcccagtggccataggactggacctttccattggattacatgacatggccttagcagagtccacagttgccttgattgatgacaaagtcaagcagacaagccagcaggtcatttcagcatgcaatgaccatcagtatccattatttggactatgtaataatctttcaggaacactgtaaacagtggtattagacctaaataactaatatggttttaataaacctaaattactatttaaacttaaatagcttttaggtattcttgacatcacttcttgatgtctgtcaggtaataagttcccacgtaagaatataaagctaacgtatcctcttaaacctttgtttccaaaaccaagagcattttactgaaactctaatatacaggcaagttgatccctcattaagccatgtgttcatcttaacagatatgcacatatttttctaatacagaaaccagtttcctagactaattgaagatccttgcattgaaggtaatagagtcttattatttgcattcagtgtgaactgtaaaatccaagtcattagagaaaacaagaatatgcttctctttcaaaaaacatcaagcatgttttatatagtcttagttgcaaatttccatagttactatgtagtgaaggttttctgaaggagatgaggattcttcagagcaagggttcagttaactggcatctggaaagaaccaaccttaattctaaatcctaactggattttcagaggccattctgagggtagtagattttatctatgaccttgtgtgccagatgtttcattttatgttctcccttatttacctgaaagtgatgatgggcaagggaggcatatgaaattagctgactaatgataacacgtgatcaactacaggcttcatagctgagataccccaaagggtttaattaggatttcctgccaatctgagatttggaaagtgatttgggataacaaaacaaacacatggaaacagaatgtgatttaaagagacgactcacttaagtcaccagtctccaacagaacagaaccaatgttgcattatcccagagtgaactgagtcacctaacagcccagaggccagcacgcaattaaagcttctgaggtgctgtgatctgaatgctggtgtcaccccagaattcatatgttggaacctaatacccaatgtgataatattaagaggtagagccttttgggaagtgattaagacatgagaactccactctcatgaatgggattagtgctctcataacagatgttgaaggggctgccttgtctcttccaccatgtgaggatacagagagaaagtaccatcctggaagcacagaatatgccctcaccagacacagaatctcctggggccttattcttagattccccaggctccagaaccatattttgttatagcagcccaaatggactaaacagaaaacatagacaatgtagggcaagcgtaggtcagtgatagagaagctttgaagcaggaaggaagaatgtgggatggacagtgagtgaggcacatgtagggaatggaggtagacagcatcatccagggtacattacaaatcccaccatcatatgtaatctgccattgttcagtgtgaacagtcactgagcatcagaagaccttgatcctattcccttctctactttggagcaagttacaacatcatgggcctcagtgttctcatctaccagataagaggatcaggcccagataattgtatcagttcttattcattttgtaaatattttatgctatgccccagtttttaaaaatagaatatgtattagtcagccattactgcaataatgcagtgtaacaaatagcccctgaatctaaaagcatctctctctcttgctcatgggtgctccaggtggctggatattggctatgctcaaccggtttaggttggacttgcctccaggtaccagattggtccagattggccctacttgattctcctctcccttatgctagtaagtatgtggggttttctcttctcaggcagatcacagcagtgtcagagacaagccaagccacacaaaaacatttaaaacctctgttccagacattctgctatcacgaccttggctgccagttacatgtcggactccaaagtcaacagccctgacaagtgtacacctcataccctcagggaatggcaaacagtgggaaaaatgatagattggccacaatctagtatcctgagtctccagttttagttatgaatcctctcttgaacatgttttagaatatttcaaagttgagaaaggaaagtagcccctattaatgctggaaagacaaggagggaaagaaaagtaaaagcagcagtttttcctctattattgcaccttattccttgtcttaaggaaatccccattttgcacaagattaggttatttaagtgtttttcttcacttactttcttctaaattattggtgaaaatactaagttcacagccagaaagcttgacataaatgcctgtttgtcaactttgtaaagtggataggaatacaaatatgatgtagagctgctgtaaatctggtagaataattaaaactttaaaatatttcatttcatgtcacttgtaatcactacaactgtaggaatgatgtaaagcagagaaaataggacccatcttacatctgctagtgtttgttatgaggacattacctttcctttacttttttaaaaatttcaccagtgaaattatattgaccaaatgaaaactcatagattactaatgtgaatttactatttaaaaataatgttgaactcatattggacataacaagtgatgatataaacctagattttattttgatcatgaaataacctagtcatgaggagtaggactgtggaaacctggcttccccagcaggaacacagacgggaacacagaccaccatgaatggaatcctgtaatccatctgcagcttcaactctttaactcacaatgaagccatatgaacattctctttaattaagagatgttacagttttgtgagatacaaaatactaccgaaataaagaaggatttcaacgtctttattgacactctactgcagcataaatggatctaccaagtagggtacattatgcagatacatgcccatagcaatacaaatgttaattaaaaccttgtttaagatttctattttggaatgagttagcatttcatgctggtaaaagaaattgattaagcgaattacataaattagccaatactcagaagatccacatagccttcctgtcactaatatagatttttatcaacacgatatgatccacaggtgtgagagcaaacataacaaaggaaataactaagaaatctgtagtggtgatttctgcatctcgggaacttatcatctaatactttataacaagaacagttatactctctcctctgctattttgtatgcttttgtttcatgtccatccacacatgcatacacatgaacacatgtaccggggaagagagacaaggttcacagatgtatcctgtattatttccttcattaagggggcatgttccagttggagagtctaaacattaataaaaaattaactcggccaggcatggtggctcacgtctgtaatcccagcactttgggaggccgaggcgggcagatcatgaggtcaggagttcgggaccagcccggccaatatggtgaaaccccgtctttactgaaaatacaaaaatttgccgagcgtgatggtgtgctcccagctattcaggaggctgaggcagaagaacttcttgaacctgggaggcagaggttgcagtgagccgagatcgtgccactgcactccggcctgggtgacagagcgagacccaatctcaccaaaaaaaaaaaaaaaaacaaaaaaaaaattaggggtcttaatttgtatcatattctttttataaattattgaatacattggtagtacatgtttattattaaaaggtagcagataccttttaaatataaaaaaattaaatttaaaaatatttaaatttaaaaaactagtaaattttaaaaaataaaatcactctgatgtcaccatgctaagatggatactgtgaccattttgacctcaacatccagacttctctctacacatatgcatgtaaatgtatatataagttatatacacagatattttacatatataaacttaaacaggattgtgcagtgcctaacattttataatgtactctttgattcaacaatatatgatgaattactttctgtactaagaaacatttttagggaaactcattctttcagcaaatatgctcggtttctttcaatatacccccttggatgaagttgtaattgtttggttgtcttcataacctctaccctctggatctataatctagaagagaagataaacattagttaagtaaacaaacaagtggatttcttacaaatagtaagaaatattctgaaagcaaaataaacagtgtgcaatgaaaaagagcagtggaagaatagaagcatgaggaggaaatggagatgagttgccaacaaactcagaaatgattccatcatggggtcccatggcacaaggatcctgagcagagggcattggtcagcgagtagatgggaaaagatgcatgcacagaagcccagtgagctaagaaggaaccagagaaataagtctggggttcatccagggcttggtagggcaggtcaagggtttaaattttatcctaaagtttgagtatcttttagacaagagaaggaaatgatctatgtttggaaccagaagttcattgatgattttggcaaaaggatgcttagaagaagtaggagagaggtagccaatttgaagggtgaatggtttcataaatttatggtgagggatctgccttgttaatccttctcatattgtggaatatttagcatctattgtctttggtaccaaaacaaaactgaagagaatgatggtaaatatctatatcttggataactaagtcacaatgaataatcctgcttgttagaggcacatgacaactcacacatggtcaacgctctatgcttattcggcctccagggagctagaccaagggaaagacttacaagaagactacaggatggggttgaggggtgaatttcagggggctaaataaacaacaaggctctgtcttcttgggtcatgtcttccttggtcggctctcaagaaagatgatcctggcacttcctccttcttggaacctgggctctagggtctagatctggtctacttggcactcagagacagacactcccttttccttcatattctatgtgtttgcctcagggtttaccatttcttgtccacagactagtagaaactgaagatccaactgagtaagcttggggttgggggaaagaagggctgaataggtcccatagcctgcatccagtgcagaccccaaacttgcctgaagtccattaagagagtgtcctcaaagctccaggtggtccattctaataacattgatgataactgtattaataataggactagctaatacacactgtaagtgctgttcaatttacatatgtcaactcattccatccactcagcaacctcatgtggtataggtcctgtcatatggggtagccctgaggctacgttgctcagtgtcacacacagccaagactcatgtcacacacagccaagactcagacctgggcctttggacttcggagtctttaacatttgtgattacccttcttctatactgtctctttccgtgtctgtaagtgctgttcagtttccacatgtcaactcattccatccactcagcaacctcatgtggtataggtcctgtcatatggggtagccctgaggctacgttgctcagtgtcacacacagccaagactcatgtcacacacagccaagactcagacctgggcctttggacttcggagtctttaacatttgtgattacccttcttctatactgtctctttccgtgtctgtaagtgctgttcagtttccacatgtcaactcattccatccactcagcaacctcatgtggtataggtcctgccatatggggtagccctgaggctgtgttgctcagtgtcacacacagccaagactcaggcctgagcctttggactttggagcctttaacatttgtgattacccttcttctatactgtctccttccatgtgtctctctggagaactgccactaggttgaacaatgagtcagatgttcaaagggctagcatcatggatgctgatcacccaaatgctatctcaccatggccactgacatcattaatgtgcagatacatgttcctacaactcattcagaagacccaggttgctttacagtcacaaaatacttttttgtaaatactgtaaattgttgaggacattgatcctccctgatttggactgaggcacagagcattgggaaggggtccagaaggtgatatggtttggctatattcacacccaaatttcatcttgaattcccatgtgttgtgggagggacctggtgggaggtaatttaattatgggggcaggtcttttccatgctgttctcgtgatcttgtgatagtgaataagtctcatgagatctgatggttttgtaagggggtgtttccctgcacaagctctctttgcctgctgccatccatgtaagacatgacttgctcctccttgcctgccatcataactgtgagggctccccagccacgtggaactgtgagtaaattaaatctctttttcttcccagtcttgagtatgtctttatcagcattgtaaaagcagactaatacagaaggaagcattgggctttagcatggctaggcagctccaatgtgtgcatgggactcagatctcagccacttctgtctgaggttccgaatacatgcttcctaagtactcagtgctgaattctttctgttcaaacatctgaagtgttgctagtcctacctttatagaactatgtttcacttaaatctgttctacctttaacttgactttctgacttcactccagttccactgtattaataactgaacagtgggatccaggcctgatctgcactggaataacatttttgcacagggatcttttaaaagtgatttaagttctgattctgttttgcctgtgtatatgttgtggaactaatattaactaatttattgagtactatttgcaagacctatcatagctgttttgtgtctagtttctcccttaatcctcacaacagctccatgatacaggaggtaatattaatattcccattttggaaatgagtaagctaggacccagagaggttcagcaatttgcctaaatatgcacagctaatgggtggtaaacagggatgttgcttgcacctatgacaatggtgcaatagaaaagggtacttctactttatgatacctcactttcatctgctgaaaaattattgaaatatactggttttttaagaacatgccactctatggctaccttccagaaaaaaaaaattgtaaaatttataaatctaagatgtcgatattggcagtgtgcttggcatcccctagagtgtgtaggggtgaaatctgtgaatccaactccaggaaccaagctctcagcatgtatgttacagtgcctcgtgagagatgaaaggtctgctgtttttcaaaaggtgccagaagacaccctcattttggagagcaaaaataaattatctcaatcagtcctcattccttatgttgttagcatcaaaagaaagctttttctcgggccaacatggtagcttttactcagagacactgtgtgcctattaccagcaatgataggtccaacaactaaatgttgatgagaccttggaccttgaggttggccaaggccgtgctatgattgcaagattcaatttggtgccatggtttgtgaggcttacaaaagtgtataatgttcatttgctttatgtcggattattgcactttctcatttatttaactccttcacttaccactcattcattcattcatcaacccaatcattgtttgaaagcctactgtatatcaggaactgttctagacctccaagataccaagattaacataacacatgatcgttgcatctatggagtttatattctagaattgttttactttggacaatatcacaagctctattttattgagtgtgatcattaaattaggataccagatcttagggttgaaaagggtctcaaaaattatctcatctccttcattttaagctcaatgacaagtggcatcctcaaggtcacacagtctatggcagaatacagactcgatgctgtgtccccagactcctggtcctgggtctgctgctactgccagaaacttcattttaatcaggtgttggtgtcagcatacacctggtggcgagcaagaaggcagcttcaaggtcaatacagggtaggacatagggtcagactgagacctgtgaggctatgagatgaacattgctgcaagccaaatctgagagcttggcctcaagggcctgactgccagtgccccagttctggctcttcttctttttttcttttgtttttttgagactaagtttcactctttttgcccaggttggagtgcagtggcaggatctcggctcactgcaacctctgcctcccaggttccagtaattctctgcctcagcctcccgagtagctgggattacaggtgcccaccaccacgcctggctaatttttgtatttttagtagtgacggggtctcaccatgtgggccaggctggtctcgaactcccaacctcgagtgatctgcctgtcttggcctcccaaagtgcagggattacaggtgtgagccaccacccctggctggctcttcttttaaggtctgtgaacttgagtaagttatttaacctctctgttcctcaatgcctcccttgcaaaatagagataatcataaagctggtctcacagggttttcactaagattatgtaattgctcatgggaatcttcatacttctcccatggttggtgcttggtgaagcttggctattgttattactattattagtagtagtattgcctctgtgactctgtggacaccttggtggagccccgagcttagtttcttgaatcccccttgtgattcttagagtggcaattcccacagcaagtctccccttgcttgaaaatggtcctgaatgtgacccaaacagtgaacatgtcacagagcctgtctacaccccttctgaagaaagccgcctgtaggtcatccatcaaaataatcatttaatttcacattcctgattttgatccttttcaggaatcctgaaagtgaattcctaccttttcagccaaatgtaatctacttcctgtgttttcagccaccacatctgattataggtatgtggcatatctgcagtaagtgtaacacactatttcccaaaaagaggccataactcacatgcagaaccaaatccttttggaaaacagtatatgcccttcccagaaacccaaaatttacaataacttattaaacaccctggagggtactgaggtaataaaatctaaattctataaattgattgtttcagcaagaaacaggcttccaagctggcttcatgcatgcaggaactctatcatcccaaaagactgtgctcttagaaggacccagtgcttgacttaatgcgctgctgttttcgtcttgaaattcttaaccattttttaacgagggcggcctagtttcacttggcgagtccttcaagctttgtagctgttcctgacacccctcatcatatcccacagaactggtgttctgccaaacaagtctcaggtgagacccctgttgtctgttttctgtcatctgggtcaataagagacaaactcagtggagagttaagaatctatcttaattgttaaaaatatgcaccagatttcctaatctaaatgtatgtgcacacaccactagatgccagcatgaaccagagctgctgaattcctgttcagagagaattcagctcagccttgttttgagaagttctaggttcttcccccagaggactatgatggggcaacttaaacccgaaaatactgttcaagtgtaatttgtgtaaactaaccatctcagggggaaatttttccatattaatctttgtgtaatttctgaattataaaactatttttagatgaagaaatacatcactacaattgatacagagacactttaatttaattggcacaaaagtatgttaaaaatattccacagtacagatgctccctgacttatgatggggttatgtcctgataaactcatcctaaattgaaaatatcttaagctgaaaatgcatttaatatgcctaacatattgaacatcatacttagcctacctcaaacactcagaatgcccacattagcctacagttgggcaaaatcatctaacaagtccgtcttgtaaaatgtgttgaatgtctcatggttgtttttcttgattccatggctgactgggagctgtggcaccctgctgctgctcagcatcatgagagggtatcatatcacatatcgctagcctgggaaaagatcaaaattcaaagtatggtttctattgaatgggtatcacttttgcaccagtgtaaagtgcaaaaatcctaagtcaaaccatcggacaggaactgtctgtataggtaaagggataggcatagagatcagtgaaactgaatagagaacccagaaatagacccacacaaatatgctcagctgatttttgacaaaggtacaaaagcaattcaaaggagggatgatagtcttgtttccataaaacagtacaagagcaattggatatgcataggcaaagaaatgaaccttcacctaaatctcatagcttttttttttttttggtagatacagtttttaaatttgtattatttattaatttttaaactttcatttttaggttcaggggtacatgttcaggtttgttataaaggtaaacttgtgtcaccagggtttgacataaagattatacaaaaattcactcagaatggatcccaggcttaaatctgaaatgtaaaactataaaatttgttgttttgtttgctgcataataccaactaaattaaacaaacattagagaagttgaaagaatgcaaggatttaataaatcatctagcaacaaggctgcactttgagcagctgcgggctcacaggattttcctttaagccaagaggattccgcttggcagctgcggggcaaggccactggtgtgccacgccacctcacaccgcagccaccagacttcagaactggaaaagggtgattccggggtaatctctgccacctcctgcctaaggagagatcttgtccgctccctaccatttgtctatcactgatcgattccattattggaaaactttctagagcacttgttggggacaatgtaggtctttcaggataggatggcctgtctcaaaaggtcatcctagggccatgttctttcttcgtttcctacttgtcccactcaacaaacaaggctaattgtggctacctctcaaggctgtgaggaaataatcattcatagctgaaatgggtcttgtacatatcagtgattgtacattctccccaatatctggatttagtgtctaatcgggtgtttttttgtgacacatgttgtattgataatgatcaatataggtttattgagaataacaaataattacacaaattcaaaaattattttccttcattatacacagggcatatcaggactgctttttgcaattataattgaggtgctgctgcattattttgtttaattatttccacctgatggcctgattaggaaaattgctcaccttgttttcctagcataatgcaccattatgagaagcaattactgcagcctgtgtccccagcccccaggctgagctaccatcctacagtggctaccatcctgtagtgtgcatggtcttgccagcgtccagatagagtttgagttcagccatttgattctaagcctaaattcaaataatctgtttttcaagaaagggttttgtttaactctaagacactggaaaggtgatgtgtgatttctcatttgctgatgtttgacgccgttgttggcgtctccgtgttggcatgagcacactgctctctgcctccatgttgtgtgttcacacctgctctggctgtacaagctgaaagggttaaacgtatcctgtcctggtggactttgtgtggcattaatgtttgagaataagtgtgctctgccaccacgtgatcatgtgtgtgtaaacatgattaaaaggaaaatggtgatgacaaggctggtaaggaaagttgtggaactgcattaggacaggcagccatgcgagggccagaatgaaatacccagtttggaagaagaaaggcggtctagatgccccttggaagtcactggcccttcccaggtgaaaccatgtggtgtggactccagctgcctcaggtgacatcgcccaacgcaggtgatattatccacttcagatgacatcgtccacttcaggtgaaatcacctacctcatgtaacatcatctacctcaggtgacattaaccagctcaggtgatatcttctacctcagatgatgtcatcacctcaggtgacctcatccaactcaggtgacctcatccaactcaggtgacatcatctacctcaggtgacatcatccacttcaggtgatatcatctacctcaggtgacatccacctcagatgatgtcacctatttcaagtgatgtcatccacttcaggtgacattgtgcagtctcttgctagccatttccctaaactggaagagagatagaaaaaaataaatcctacctctgccatccgccaacagtgtgaacaaatccaactctctccaagcttttgttttcattccttaataattgaattataggaaaatcatcttcaaagaaaaatgcagtcccgtgcaggggttggagatggggccagtcaaagcagaaggagcccatatgaacaggcagatgttatgctttctgtgttggtcccgtgcagctggtgcctgcctgctgcaggtgctctttttttttttttttttttttagacggagtcttactctgtcacccaagctgagtgcagtggcatgatctcagctcactgcagtctccacctcccgagttcaagcaattcttctgcctcagcctcccgcgtagctgggactacctaccatgcccggctaattttttgtatttttagtagagacagggtttcaccgtgttggccaggatggtctctatcttctgacctcgtgattcacccacctcagcctctcaaagtgctgggattacaggcgtgagctaccatgcccggctcattttgacaggtatattaatgaatgaagaagaaatgtgactgattttttttgtatctgtaaattgcttataatttgaaacagatagaaaatggttacaacagaaatgttggctttcacagctgggaaagaagaacaaacgagaagcgatgggtcaacctggttaagagagtaggtttcaggctcagacttccccaggtgcaaacccagctcagctaccgtggaacctgggcacatgacttcaccctctgggcctcagtttcctcacctgtatgacagagattatctcacctaagccatataattgctttgagatttagtaagttgatgcatgtcaaaatgaagggcactgactacttttttcctttactatatctattcatagctcatcttctggcttcgttgatgaaaaggggcatctattttagggcaagataattagctgtgtcctatatgataggctgaataatgccccattcaccaaagatgttgaatccgaagcactaggaacctgtgaatgttactttacgtgggaaaaaggactttatagatgtgattaaattgaggatctttggaagtggggaggatatcctagagtgtttgagtggcatctaaaggtaaccccaagggtcctcataagacagaggctggagggccgaagtgggaggtggtggtgtgaggaaggaagtggagatctgagtgatggccaggagctgagaaacaccgcagcctctggaaggtggaagaggcaaggaacagattctccactgaagcctctggaaaaaacagccttgccaacaccttgattttagccttttgactatcagaagaagaagatatttatttatttatttatatatttattttttattattatttttgaggcagagtctcatgctgttgcccggactgaagtgcaatggcacgatctcggctcactgcaacctcctgggttcaagcaattctcctgcctcagcctcccaagtagctgaaattacaggcacccaccaccatgcctagcgaatttttttgtattttttaatagagccggggtttcactatgttggccaggctagtctcaaactcctgacctcaggtgacctgcccgccttggcctcccaaagtgctgggactacaggcataagccaccacacctggccagaagaatacatttataagagaatcagtttctattgctttaagccactaagttggtggcaatccattacaatagccacaagaaactagtacggttgactctagaaaaatgcagcagttggggtactgactgctcaggcagccagaaatctgcatataacattttactccccaaaacttcaatatagtagcctactgctgactggaagccttactgataaacagttgattgacatattttttgcattatatattttagatactgtcctcttacaataatcttgagaaatgaacacattattcagaaaatcataaggaataaaaaaatatgcttactattcattaggtggaagtggatcatcataaaggtcttcgtcttcatcatcttcacattgagtaggctgaggagtcataaaggtctccgtcttcatcgtcttcacattgagtaggctgaggagtcataaaggtctttgtcctcatcgtcttcacattgagtagttcattaggtggaagtggatcatcataaaggtctttgtccttgttttcacattgagtaggctgaggtgtcataaaggtctttgtcctcattgtcttcatattgaataggctgaggaggaggaagggggagaaggattcatctcaggaggggcagaggcagaagaaaatttgtgtatcagtgaaactgcagaaacttgggttgttcaggggccagttgtacaccccattacatgagatttcaattagtttagatggaagtttttctgaaaatctttgcataacatcagcccttttaaatgagagataatgaagatgtggcaggataactatttttgttctatttatcttcgcagagattctgtataacatagagatgctccatattctcagactgctttgcttttcgaattgctggttttcatttgtaagattttgcagttgtttttctccctctccagctgtctcagtagcggcttctctctcactgctgcctccacccttaccaccttctagttgtacagctagagaagaagaatgccggtaaagatgtgtgaagcacgtgctgtgtgttctgcctcaagtgcgtcgcacacggtatctcatttgactttcccaaaacctctgtttacagattgtgacaatgaggcccaaagaggcgaagccggcagtaaagctacacaggaggaagatagacaggagtccagcggtagagccagggccctgaaaaccactcttcactgttgtattaattggggttctctagaggacagaactaataggatagatatgtgtgtatatatataggggagtttattacgtattaacttacacaatcataggatctcacaagaggctgtctgcaagctgaggagcaaggagagccagttcgagtcccaaaactgaagagcttggagtctaatgttcgagagcaggaagcatccagccagggagaaagatgtaagctgagaggctaggccagtccttgttttcatgtttttctgcctgcttaatatttgctggcagctgattagattgtgcccaacaaattaagggtgggtctgccttccgcagcccactgcctcaaatgttaatctcctttgtcaacaccctcacagacacacccaggatcaatactttgtatccttcaatccaatcaagttgacactcagtattaaccatcacagctgtctctacatcaacttgtagaaaacattgtgttgctaaaactgtacctaaaatagcactgagctaggctgtgagtgaaggtatgaagattaattctccatcaaatgcaatgtgcagagtgctggattttagcaagaggtgacaagcagcgaccagccccctctatgtgtgtgagggtactcttcagattactggatattaggaaaaattattttttgttcatttgtattttacacaaggtcttaatgacttttaatagagttgctctgaaggctcttttcttggtcatttttaaggagatattagtaactttaattcctatgacccaaaattgcattaaggaaagaggtcatgtcttattatattttgcatctcaccatctggaatagcgcccagcatagaaaaaatccagaaagtgtttatcaaataagtaaaataagtaacatattctggagtacttaataatagccagcacttaatgagtacttactgtgtgccaggcagtaagccaggtgctgtttgtttgtattaactcatttaattctctactgacattataaggacctgaagtacaagggcgtttaacaactttccaaactacaagtggcagccctgagctgggagcccaggctatctgggtccacagttcacactttaaaacttgatgcaggctgggcttggtggctcatgcctgtaatcccagcacgttgggaggctgaggcaggtggatcacctgaggtcaggagtttgagaccagcctgaccaacatggagaaactccatctctactaaaaatacaaaaaattagccaggcgtggtggtgcatgcctataaccccagctactcgggaggctgaggcaggagaattgcttgaactcgggagacagaggttgcagtgagccgagatcacgccactgtactccagcctgggcaacaagagtgaaactctgtctccaaaaaaaaaaaagcacaaaaaacttgatacaatactgcctctctaaagtccataaatgtaacatttaaaattatattttgcaaaagacattttgcaaaaaattggaaatctgcagttgtgtttgcaatgaaaaacattattatattttgttggtgccatataataacattgaaaatttggatacaactttaagcaccatgggagagcaaagattatgtcttgttgccagttcatctcccttgcctagcaagctcagagcctcctatacagtatgtactcagtagccatgtgggggctgtcaaaagtgccatgctgcaaggggttacagtgatgcttgaaaaagtacctaaaatgcaaagttttcatacactaatgcaactttcattatattttatattcctaaatgaaaggagtcacatgaaatggtgtgtgtgtgtgtgtgtgtgtgtattaggtcgctgtatgataaaggaagtagaacgatatcatgtcagtggtcagctgggacacaacatgcctatgcccagggcagcggccagctgaaacacacagccccacgacactaaatatggatatttgctctagagggaattagtaaatttgcatatcctgtttggagatagttctgccttctcgtttagtttttgcttgtcttagactctataaaagactcataactgcagttcaacaattgataataaaatagtatttgcagcagtgtgtggtggctcacacctgtaatcccagcacttttggaggctgaggcgggtggattacctgaggttgggagttcgagaccagcctgaccaacatggagaaaccccatctctactgaaaacacaacattagctgggcatggtggtgcatgcctgtaatcccagttactctggaggctgaggcaggagaattgcttggacccgggaggcagaggttgcagtgagacgagattgcaccattgccctccagcctggacaccaagagcaaaactccatcacacacacacacacacacacacacacacacacacacacacacacacacacacacaaagtatttgccctcatggtcacacagttgaggccagcgcctttgttgggagaatgaagagtaagtaaatctcaggtaaaatattagggttaagacagatgagctttggtgttgaacatgccaagcctaaatttcagaaacttaaaggcagattccccttcatagtagatcagactggacctggactgtgaggacagacaagaaagatggagctctcccagagcgaagatgatacagtgtagcacaaagtataatgggtcaaggtctggaagaatttaggatcaaaattcagctgattaatcagtatcatttgggaaattccctttaaaaaaatggggctttctgcctcagtgctgatattcatccagaacacaatacttaactgacctcaactggatgacatcttcaatcaaagctcacaggaagacatagcagcaccaggccacatgcggcaggcagccgtgagcatagcctccctagcttgtgtctggtttggtttgatgcatcaggatgagaatctgcagcattcttccaatgacaaagccaatggggcagcttatcctctccctaactctttccctgtgtttactgtgctgtagagattttgcataaagtgctgcaaagtgggtagcaataagggagctgaggtttcattcacagagggaaggccagggattctgaatgttgactgcaggtgggcattgtgtttggcaaatctcttctacttgaggtctgaccttagccttctagactctgaaaaacgatcctgatactgacccagattggagggggtttggtaattctggttcatggtaacaaagctcccattaacctattgaacaattgagtttgtcagtatatgaatggcccatgcccagggccatggtcagctgggacacatgggttcatgccgagggccatggtcagctgggatacacgggttcatgcccaggacagtgatcagctgggacacacgggttcatgcccaggacagtgatcagctaggacagacagccccattccaatgacagtggtctggtcagctgggacagacaggtccatgaccagagcagcagtcagctgggccacctaggcccctctcctgtatgccctgctcgctgtcttcaaggctcattgcagagagtgctgtggccagaaggttgcttggtgagcctggaatcagaacactcaagcttctggtatctcagacggctgacagcatcaggtcccggggctgacacctagggagctgcttattataccccctgtaataagtattcccacaaatagggatagtacccttgcacactagatttttttttcaaagtgttagccaagtaccaatgaagaaagagcaaatgtgagccaagatgacggtttgggcttgactgaggagaatgactgtggacattgtcctgtgtgtgctgctccaaccccccagcccaaatgacaccattcccattgtcatgtttgctgtggtcactagctggtgctcctaggaagcacacaacaaagcttgctgggcctctttcctaggctccagccctttgagttatgcctctgggaaagtatcttgtacttttcttcatctctcatgtcatagtactctctagaacacttatcttttatgacattgacatctaaaaacaaaataaatagtgaaatgtggcctttgacaactttaatattgccatttacattatgaacctttaacaatttagaatgtataacgagatgacaaatttcctatttctgaaagtagtcacagatgcatagtagtatagacacatagatgccgtgaactgttcccacagcaggcaacgtccactcgtgaaaatgcccatagaccacctcgccaaattactgaatggccaatgaaaggacaaatggagagaaaaggaagcagcacaggttttccaacaaactgtccatggatcttgtaaagtgacaacatttgtgaccattgtaggcagacccatctatgcagcttctgttaactgtgacagcagtcaggctagtttaggaagtctgcctcctgcttagctagccccagggcacaagcccctgacaattgtgcctggctttgctggatacagtccagagtcggtcttttcttccagtgctaccaatggagtagtatggggccagccacaccctctgaccccaatccatgtgtgttcacaggtgcaaatttaacaatcaaacatgagatttggagaagctcttgattgaccagcaagcaaagtgaaatttactgaaaagtttagcttcattgtcctttattctgccccctacaaaaggatattatatatagatagatatccatatatacatagtttattcatgttcacatatataacatatatagttaacatgtgtatgtttatatatgtttatggatacacatgcatgtgtgtgtgtatatacatgctgaaggtggattagaaactataagattggaagtaaatatattctttagaattatactaaaacagaaaaaaagctgtatttttgtttttaagtttatgaaatgaacaaggaagagtttttttttttttttttttttggacaccgagtttcgctctttgttgctcaggctggagttcaagcgattctcctgtatcagcctcctgaacaactgggattacaggcacccgccaccacgcccagctaatttttgtatgtttttttttttaggggggggtaaaaaaattcttatttatctatttattattatactttaagttctaaggtacatgtacacaacgtgcaggtttgttacatatgtatacatgcgccaggttggtgtgctgcacccgttaactcgtcaaccaaacaccgcatgttctcactcataatttttgttatttttagtagagacggggtttcaccatgttggccaggctggtcttgaactcctgacctcaggtgatccacccaccttggcatcccaaagtgctgggattacaggcatgagccaccatgcctggccgggaagagaattttaatctcagctacatcattatcttttttgatcccagcattcctttatgtaacccaaaccttggttctgttttggagttgtagcctcaataactgtaagagattaaacttctgttgtgataatttttgtttgttttttgagatggagtttcactcttgtcacagagagtgcagtggtgcaatcttggctctctgcaacctccaccccccaggttcaagcaatccttgtgcctcagcctccagaatagctgggattacaggcacccatccccatgcccagctaatttttttgtatttttaatagagatgaggagattcaccatgttggccaagctggtctcaaactcctgaacttaagtgatctgcccaccttgtcctcccaaagtgctgggattacatgtgcgactggcctgttgtgataattttttgtggaaacccccaggaaactcacacagcttatttagattaaagataagaaagctatttccagaatataatctattcccagaatgtcatgtcctcaggcatatcgttgttgaacctttgattatattctggaaatagattttttatctttaatctgaagtaaattgtgtgagcttcctggggattccataacatatgaccacaatagaagctgattctctcacagttctggagcttacacctccaaaattcaggtgtctgcagggccatgttctccctgacagttctggagaggtccttgctcacctcctgcggcacctggcgctggctggcaagccttgctcttgttggtttgtattatagacatcacgccagtcacacggctggcttcttccagtgtttttacctcatgttccctctatgggtgtcagtgtctgtctccatatttctccattctataaggacaccacttatattgaactggcacccatcctaatggcctcatttaaatttgattatcactataaagaccttatttccaagtaaagccatgttttgagatactgcaggttaggggtctgccatgaattttggggggacgcaatttatcccatgacttctaaattagaaaataaaagaaatctgttttaaaaggtacgtcatgctgctaggctatctgcaaattaacagtgttccaaatcttggtattgatgtttgcaaaatttaaaaataggacaattcaaattttaccttcctgtttttagaaatcatatttttatattagcttatttattaaagtggaaaaccgatattagctatatataaaaagagaaaggataataggaaagtgaggaaatataaaattttgtttgtaatatttctctaaatgtttatccagcatctccctcttccccacacccctcacagcctccgctcttggatttctgcccattaagactgatagcaggaacatctatgaaatgccattcataattaattttgttacatcactgatcatggcccacatgtgttactggtggatggtatctgagttaccggcagcgaatccatatggctctatagcaacaccaattcttgcctcctcagaggaaagaattcgaccaaggggtataaggcacaaaaagagactgaggcaagtttcagagcaggagtggaagtttattttagacagctttagaacaggaaagaaagggaagtacacttggaagagactgaagcaggcaacttgaaggacaagtgcaatctttaaccttgatcctaggactttgtaggctggcccacttcaggtgtcttgcacccctttcccatgactcttcgcttaggacgagcttcccgcatgcgcagtgccctccttccccttgggaggtgagcatgcgcagtgtgtttaggaagttgtaacaccgtttacatacatgttctcaatctctctctctctcgttgtggataatgagtcagttaaaaattagtaactgtccttgttaatgaaaacctacctacattaatacaatacttctgttcaaaatattcatcgtgactcaaaattttgggaatgaatatatttgctgttaaaatgcttctagatgctcgcatatgccactgcctggcaaagtcagaagagggtacataaattacccaggcgataccttctatgccctctggacttttatgccttgttagtgtctaaggttacagaaaaaagaaatggaacactcgggttgccagggagacatccaagcctgtcaacccctctagctctaatagtgacaaatggtacttattacatcaggactaatttcattggattctgctcagataaagatacttaacctttactgataaaattgtgtcgttataattacttagtaaaagaccttattaggcaatagtattctatgtggatagacgaacattttattgaggttgattacctattacattgatggaatatttgaatgtatgattttctgcaagacctttacttcttggaaaaacctgcagcaaagagattttggttttgtggctgcctcatatggaggaagtttaaaaatgtggtttttgcaagttgttattgaaaatccagaaaaacaacatatacattttttaaaaaatagactttacatgtcaacttttttgttgttgttattgagacggagtctcactctatcacccaggctggagggcagtggcgcgatcttggctcactgcaacctccgcctcctgaattcaagcaattctcctgcctcagcctcctgagtagctggaattataggcatgcaccaccatgaccggctaatttttgtatatatatatttttttttagtagagatggagtttcactatgttggccaatttggtctcaaactcctgacctcaagtgatctgctcacctccgcctcccacagtgctggggttataggagtgagccactgtgctcggccaccaacttttaaaacaaagctttctatccaggcacataaaattaaaatatccaaatatgtcaacgaaccttttagacttttagggtatatgccctcgaaggccaagactggaaataaattacattttgaatgtcagttccatctgactggtagtgactgcctggaatgcagaactgagaaggattctgaagtcttatctgtgctcactagaaaagagtgtagtaattgattagcaatgtctgccatgggcatgagcaggacatgcatcagtggatatgctcataattgccatcccttgtctaagtttatagaaagatagcagttgtgtcaatgaggcattcagtttaaaagagccttttctgtctcctccatatgcattacatgctcagagcctcctcattctcagtttgtcttaggcagggaaaccacagccctataggacatttctcaaggttggctctgtagacctcttctaagcaccctcccctgcagggcacctgggaaaagaaatgtcctctcccaaggagctatttgtttcaacactgtcagagagaaagtcatggagatatttgtcttaaaatccaagtactttttgtttcctttgtccattttggtttccgcctctcaggtgttaattctgctaaaatggtgattgataatactgttgtttatctctcctgagagccaaagatatgccccttgatggcggaaattcaaagactgtgagaggcagtaaaagaaaggctctgggacagggttatttttcaacatacacctcaaaacacacagcgctggcagctcctatgagagcacatgtatttgatatccaaatttttctagcctagtgtcccacaccaatcccacaagcacaaatgtaattcttcaaaaaggagcatgctaagaagtgccctgaagtttgcagaatgaactcatgcagcactttctgagcaggctgggttccccttgcctatgactatgcttaccgaaggtcaggcttccctttgacaagacaggacaggtactgtatgcttagtttctctcctctgtctcaccagtttcggaggcgtgttcaggttctaacgtcaggggtgaggtgaatccaggtgaggaatggtggagtgaaggatgcagtgatgggcctgagctgcaggcagtggtgataccagctcctctccatggctctcaagtcttgaacacacatcaattcctctgtctttcttcatggctgaaacaattgtcaggttaacatattatggtaaatataggtgagaaggtgacacttttaagactatgcctgaggctgttgctcccaggcactctccttattaagcttctatattagtttaatattagtttagtatgctgggtctgccatcacaaagcacacacagtgagtggcttacagcgaaagaaatgcatcatctcccagttttggaggctggaagtctgagatcaaggtatcagcagggttcttccttctgaggactctgagagagaatctgttccattccttgatcgtagcttctggtcgtttgctggtaatctttggcattttgttggcttgtagaaacatcatctgatatctgccttcagggtcacatggcattcttgtatgtccgtttgtgtccaaattccccctttgtataaagataccaggcatattggattagtgctcactctaatgacctcattcagctaatttcatctgcaaggacagtattctcaaataagttcacattctgagatactggtggtaggacatgaacatacaaattttggggaaacagaattcaacccataacaccatagatacttggttcaaaccaactctcctgaatcctgaccttcctgcttgctccataaagtttgacttgattccctcagttttcctcaggatttcagtggcttccaccttttgaaaacaaaagctgattttctgaattataaataccaggcattctgattttagcaaatgtagaggcttttgatacggataaagaaaagataaacgaaatccagaacccaagtcatagatcttgagtcatacactcaagcgcagattcatgtcaaactgtttccttttagtctttcacatatatctatagacttactttaaaaatgaaaattggcattgtttatatataatttctcaccgggcttattttaccagtgttacattgtgattatctcatcaaattattcaatattcttgaaaatatgagttttcttgagctacaaagctatcacaattggtatcctgttactgtattttgctttgtgcctaatttttttgttttattatattatcagtcccttaatatgtcattttcataaccactttttctctaatgactcaaaagcattccttcagtatttgttctaatgattactcttaaattttatatatacttatccaaacttttttataggtgtaaaagccaagaataaaaaagtatctatgggtttcttgggtataaagtgggtaattttatataattttaattttttattctttctagtcagttccttgttccaataacaataatgtgagactttatacatggtgatgatgatgctgacaatgatagaattgattttaggtttcatgaccatatcatatcttttgacataatttatgtttagctgagattaagttatgcaatacattcttgagttcttttgataggctagaagatgtatctgagtaatttttcccagaaattatatgtgagtggtatagctggtgagaccttgaatctgggtgaatctctttctttgccctcatatatgaaagataagatggctgggtatagaagtttgctcagagaggtgcatattctgttccattgaccttggatgatgaaacccagtgttttcatgtataaattacctgttttaccagcctgcacagttagaaaactttctttacccctatatttcaaaattctttgatatatgtttcagaattatttctcttttaaataatatttcggatacttcatgaatttttctatctgaaaacacaggattttatgaactcttgaatacatttaaaaaatattttctgggctgggtgtggtggctcacgcctgtaatcccagcactttgggaggctgaggcaggcggattatgaggtcaggagatggagaccatcctggctaacacagtgaaaccccatctctactaaaactacaaaaaaaaaaaaaaaagctagccgggtatggtggcgggcacctgtagtcccagctactctggaggctgaagcaggagaatggcgtgaacccgggaggcagagtttgcagtgggccgagatcgcaccactgcactccagcctgggtgacaaagcgagactccatctcaaaatagatatatatttttttctttaattatttccttttctgtgtcctgaattcctggaatttttggaaaaaaataggttgaatattcatgtccagttcataggtttttaaattgttctatcaggggttttttttctctaaatttttgtgaaacatttatagtttgtatttgtattttaccccactaattcaattttatgcattattctactgttttcagtccttaattcatttatcatgttttttcatatctatccagtttattcacatcctagcctatcccctcattttagcagattgttctagtttcacatacaaaattcctttttggtttatgttgtgataattaattagatgttttctaaaacactaatttttactgtttgctaaacaatcttacttttgcccttcagtaccggcaatcctgagcaaaagaaggcttgctttgattgccagtaaaacccatgttcttgtggccataatcttcacctcacataacctaaacaccctccttggaatattacaaaattctcccgttcccagctgcagaactatatgaattggatttacagatatcatagtttttttcagcatccacatctttaacttgaatttcaattaaaacttattggttggtcaaaacttaaactcttagaagattttttgctcagataccatgtcaaagtttagaggacgttcactgaatcctttcctctggccagccttactttcctgtcttcccacccagacagttttccagaatctgagcattgaaatctcctgccaaacacaatggataacactgaatctcaatgctttcaatggatggcattgaaatctcctgccgaacacaactgatactctggcttcatgttcatgaaggttctttacacccctctaatcccctatcgtacttcaatggttacttccaaggaagttctccaatctgccttttgttgaggaacttttgcatagaagaaagggcaggtgtatccacgcactaggtctaggtttgaggctgccttaaagttactgagggcaaggggcttcataatttggagcctcaccttccccgtttatacatgaggatcatgatagtggacaggcatttttcttagaaataaatgagataatttgtataaacaactttttttttgtattttgttattgtgatcctttcttcatgtctattatgtcaagtgatgtacttatgtgaaagggattttttaatttttcttgtgattaatattaactaagcacaacgattataatttgctaagttaaactgaattaaattgctttatatatctagaaccagaccggaaatatctgggtggttattatagctaaattccatactatagcaataagataaaatatgagttatttactgtctaatatggacatatacatggctctgtatatctatttttcttcatcaaatatcaaatgcaatattacacattagacacaacaattaacttgtgttcatgtttctgaaattgattctaatgtattttctattgtactcagaaatttaccatcaatttgcaagatctttataatgattatttaaagattaccttatttcttcacctttattgtcttgaaaaatggtttctgctcaaaaagaattaaatctgtaaatgacgagttaatgggtgcagcacaccaacatggcacatgtatacatatgtaacaaacctgcacattgtgcacatgtaccctaaaactttaagtataataataataaaattaaatctgtatgaaatattatatattggcaataaaaaatgaaaataaatgagataaaaatagatgttcacgcaaccttaacaactttacaatgctattaaaggaaaattttaggaaatttcctattcagttgggagttgtcatattggaaatgcaaatatggacgtcagagttacagatatagtcagatgcctcaaccaaatcagaccaatgtcaccttttcagatgacaaaatttgaaggagcattgcacgttccagagtcccttgattttcacctgtaatgatagctagttacatgagatgttcttgaattttgaaattataaagcatttttggggggcatgaaatgttcatgaaagaatgagattttaaattttatttacatttctgtttttatctttctaaaaaaatcctaaattaattctgaaatcatcttgctctataatccaaccactagagagtagtataatacctctcctagacatatcattcatgaaattttattaaagtttttattataggatccttattttcttttagtttaataattctatcaactcaattgaagtttatatcaatccctacaatttttttttgcaaatagctcacttttttccccaaattgctgaaactacaaacctgtcatttttcattttgctcttgctttgtcttgaaatacagtgactattcttgtctccaaactctttgtctgcttattttggcaaaatgacaacatttacacaagagatggcaagaggaatgtccattttctttattagataacttcaacaagcatccattaagcaccaaaaacttaccaggcacagagtgcaaccaagggtatttctacaaataattacgaggcttttccttcctttattgataaaacacgcagacagatgaagacataatctgtgtgtgagcacagtgggtcaagcgatcagtacaaataagggtaacggagttcagaaaggggagaaaccaatgcaggatgggctgtcagaaaaatgccacaaagaaatagaggagtgggcaggagcagagccttgaaggacaggtatgaagcagagcgttaaatcaaatgtgtccaatccagaaaaaggggatcccctcatgtccagccaaggcaggacttttcacatcatgtccaagtgtgcaggtcattttattgaaaaaaatatatttgcacagaaaaactgatgaagtctagattgcaaataacctcttttgcctattttggaagtttgaagtaatcctgtgtgcctgtagttcccaacctttttttctgcctaaaaatagaaaatctgagctataaaacctatgtgtcattaataaaaatggataatgatgacagcgatgcatgacatgatggtgccgtcctgagagttgggggaaggtgtgtatagggattgcggcaggggttgggagagtttagagaggggaagcagtgtataaggatgagaagaccctcgaagagggtcccaccggccccctggggagcctgtgcaaatggtgcctcacagcaattaccttgccagggtgtgagatctcccttagagggatagaggcatttgtgcagttctgcagatcagatttctccagggccagggcaacttccctgtccaggcctaggccagttcttttgtcctttcaggattctagatttctcttccagtattatcacaatgtctcctaagcaactgtgctccttgaaaacatttggtctcactcctcagcatcttgcacagtgaccatccagacctgggtcattcattagtttgtctacctcatattcatttctctttgaaatacatctataactcagtatattagctctgtttgttgtttgaacagtctaacagtggtgccaccaacttttggcacgctctgttaaagagactgtagatgacagtgcccttttatattccgccatgttgcactgctattttgtcctagaaattgagccagttaaattccatctgtcttttctttttttataactatataaaatcatgtatcctacatttaaatataaatacagagctttgttagaaaaaatcaggctcgtttgatgataatctttaatttgatatcaagaaatacattctattgagtacctaacatgtgaaaaacgtccaaatcaaattccaggtctttttttctcaggctttttcttcctttgtttccatggaatcacaccttctttctgtagctttgatcctggaaaatgttgtaggcatatattataaatcctgctatatgtaactttggatatattttattgagggtaagaaaattgtctcttggttacttgtgaatatctatatgctgaataaagctgagatgaataaatagctcttccttcctttgtcccatgtcttgataaattatctttttagcttttagacctgatgacttaccttgtgctttatcagaacactttgttgccttaggcaggttcatgtcggcaggtaatgactcactcgagatattctctgcactttgataataataatctgtgatttttgagacatacctatatagctaactggatcaatgtatttcacactgcaggttgcactcattgttaggatctgaaatacatttaatattgtaaggccaacattaaagaaaaagaaagagaaaaatagggactaagcaatatcaaaatgtacctcatggaaaaagtgtaaattattcattaatattttgcattcccacaagtaatagttgaaaagtttagttgtctcagttcttcacagtacgttttaattttagctattctaggaggtatgcgttggtatctcattgtggttttactttacatttccctgaaaatgatattaaacatttaaaatatgctaattgactgttcatatatctcctttcactaagtatctgttcaaatattttgcacattgtaaatggcaaagaagacttttgttttcttatagtcgagttctaagaactcttatatgtgctagataccggtcccttatcatatatatgttttgtaaatattttctcttaatctgcagttggactttttattttcttaaacgtatttttggaagagcaatggttttcagctgtgatgtaacttgttttataaatattttttcttttatagctcaaattatttttgtcccatataaaacatctttgcttagcctaaggtcacttccgttttcttaaatgttttcttccagaaatattacagtttcagctcttacatttaggtctatgagctacttcaagttaagttctgtatatggtttgaagcaataattgaggtccattttggccatacagatttcttagttttttttcccctatgtatgttcacatattccagcactactttttgaattttttctttctccattgaattacctgtgcacatttgttgaaaaccaattaactctatctgtgtgggtctgttttcagaatctaatcagctccttaggtccctatgtttatctttgtgtgaataatatactgtcttgattaggtaactctataatgagtcttaaaaccaagtagtctaaatcctttcactttgttcttattcaaagttgtttcagtcatcctgtatctttggaatttccttgcagactttataattagtttgtcaatatcctgctgggatgatgattgggattgcattgaatcaagagaaataggagaaattggcaaaaacaaaggggctacaggccccatgtaagtcccaaatccagtagggcagtcaaatcttaaagctccaaaatgatctcctttgactccatgtcttgcatctgggtcatgctgatgcaagaggtgggttcccatggtctgggcagctctgcctctgtggctttgcagggtatagcctccctcctggctccattcatgggctggtgttgagtgtctgcagcttttccagatgcatgatgcaagttgtcagtggatctacctttctggggtctggaggacagtggcccccttcttttggctctactaggtggtgccccagtaggtactctgtgtggggactctgaccccacatttcccttctgcactgccgtagcagaggttctccatgagggccctgcccctgcagcaaacttctgcctgggcatccaggcatttccatacatgttttaaaatctaggtggaggttcccaaatctcaattcttgacttctgtgcactcgcagggtcaacaccatgtggaagctgccaagacttgaggcttgtaccctctgaagccacagcctgagctctatgttggtccctttcagccacagctggagcagctgagatgcagggccccaaggccctaggctgcacacagagaccttgggcttggcccatgaaaccactttttccttcaggtctgtgatgggaggggctacagaggtctctgacatgccctggagacattttccccattgtcttggggattaacatttggctcctagttacttattcaaatttctgcagcaaactggatttttcctcagaatatattttcttttccatcgcatggtgatgttacaaattttcccaaccttaatgctctgttccccttttaaaactgaatgcctttaacagcaccctagtcacatcttgaatgctttgctgcttagaaattccttccaccagataccctaaatcatatctgtcaagttcaaagttccacagatctctagggcaggggcaaaatgccatcagtctctttgttaaaacataacaagagtcacctttgctccagttcccaacaagttcctcatctccatctgagaccacctcagcctgggtttcattgtccatataattatcagcatttttgttaaagccattcaactaggctctagggagttccaaactttcccatattttcctgtcttcttctgagccctccaaactgttcccagcctcttcttgttacccagttgcaaagtcacttccacattttcaggtatcttttcatcagcaccccactggactgtaccaatttacggtattcgtccattttcatgccgctgataaagacatacccaagactgggcaatttacaaaagcaagaggtttaactggacctacagttccacatggctgggggagcctcaaaatcatggcagaggcaaggaagagcaagtcacatcttagatggatggcagcaggcaaagagagaatgaatgccaaatgaaacgggtttccccttatcaaaccatcagatcttgtgagacttattcactaccacaagaacaggaaagcgaaagacccaactccataacccaaacaactcccaccaggtccttcccacaacacatgggaattatgggagctacaagatgagatttgggtggggacacagagccaaaccatattagtgagtattggtagtttgtggttttatgagaaactagtctaaggtgtttaatttgtatgtgtagaattgcccatattattctcttattattctaatatctggaagatcttcagtggcatctcgtatttcattacttatattggtaatgtgtgtcttctctcattttcacttcttcagtctttctgtttatcactttgatatctatttcacatcaatggttttagctattataacttatgttgagtagtgtttatgtgagattttttgtttgccttattttttatatctttttgctttaacctttctatgacttaacttaaagtatgtttcttttacacagcatatgattaggtcttgcattttatacaatctgataatatttgctttttagttgaaatacttgcagtatcaaaattcagtgtgattattgacaatgttgggtttcagtcttgctatttgttttctgcttatcctatctatcctttgttctatctttccccctttcttgccttcttttggattaagtccatatttcattgtattaattgtataaaacattattttgtctccattcgtggcttattctgcccctcttttgttgttattgtttgcttgtttgttttcccctacaattcagtgtgtgtgtgtgtgtgtgtgtgtgtgtgtgtgtgtgtgtgtgtgtgtatataattactgtctatcttcaagtaatattgagtctggtcacatatattgttgaatcttattacagtgtatttccaatactcccctgctagacttgctactatttttgtgtgtattttatttctacatatgatgtaaacttcacaaaatatggttaattatcttttaaatggttaattatcttttaaagatattttaaaactgataataaaaggtgttacatttaaccacatattttctgactctcatgctcctcacttgtttacatcggttgaattttttctgatgttcttttctttctgccagaaaggctcctgtgagcagtttagtgcaggtctgtgggcaatgacttctttctactttggttagttttagcaagactcaactttacttacttttttgaattttttttttttgtactgtatagagaattctatatcaacagtttttctttgaaaactttacaagtgtcaccccattgtctctggtttgcatggcaaaatcttgtctttcttgtcttcatttgttcgtaatttaaccctggcccctttagatatttttttcttcatgactggctttcagcagtttgataatgatgcatctcggtgttgttttcttcatatgtccttggcttaatattaacggtacttattgcatctgtggctttatagtttcatcaactttggaactatttatttcaatactcccttcaaatattttttctgttctatctcttctttcctctgataggagtcctaactctgcctcccctaagtctctaattgcacatattctatactgcttgatattacacttcaagtcattgatgctttgttcatttttatctggttctttttctatccgtatttcattttgtgtagtttctattgttgtttatgagttcacagatgatttcttctgcattgcccaacttcctattaatcccaaccaatgataatttttcatttcagatattaaatttcttatcttctaaagtcttacttgggtttaatttttatattctatttccatttatactatcctttttctgccttcttgaaaatggcacatatttatgatccgtgttttaatttccttgcctgttaattttatcatctgtttcatttctttattttttggactgttaaaatggatttatttttctccatatatataattttgctttatataatatatacatatttctgctttagacatgttttgtaattgtttagtggatgtcagccattttgaattttatgttttgggtgctggattttttagttttctttcaatattgttggacagtttactgggatgcagttgagttacttggcctcaatatgattccatcaagccttgctttaagccttgtttgcacagttcttgtttgcatggttccagtctagaactgattggctcccttactaaggtaatattaatacaattctgtggtttctacttgatttctcaaatattcagacatactttcactgacttgcagggatacaaactattcccacctctgtatgagctccagtgattcttgttcttgccgtagccttggctaatcttcccacatgcattatcagaataactcaataaaagacaggggtgggccctctgtaaaactcaggatctgtccacctctcactaggattcctctagtactttttcctacattctagctctgtggcctcttcagcgttgaaactgtgctctcaactcagagaagagaccatcaggctggttgggtcatctctggaaaagcagagatttcactttgttcgctttccttatttcaggcttccctgcatgttttccaaatttataaatcactatttcatatattttgaccatgactcaagttgcataagataaaagggaaaatagggactttcttaatcaaggctgaatgtggaagtgattatagtgtaatgtaacatttaaaaatacaaattacattctaatggaactttttaatgccatagctctcaatactcagaagctaaaggtattgccagtatttactgtacagtttttatgactatgtatttgggagcagttttgaaaatacacccttaggtatttaaattattctttaggcttaatggttttctttctttgtaagcattaatattgaactataattgttatccaaataaatatttagtgatttctcagagaaaaagataaccacacattacctaaacacctggataggtcagatgataatattctagttccattcataacatactaaaaatggactatttggagattgctacctattagagaataaatgtctcatttatcggaatcacactagcctacgaactctagttatgtcatttaaaattatgactggcatcatggggcacacagtgactgcactgcacatgtgagtgaacacgtcactccagctgtgtgtcagacaggggtactgcatcatccctcctgtaggaatgagtgggctcggggaaggaaaatggagggcacatcaacagacaaaaacaaagcctactgaatatccataaatgatgtaactaaatcttaggatagaagaaacctacaagaaccaatgccaacttacgactgatgaatgtctgttgctgtgtcagaaataaaagatattcaattttcaggttgtcaatgctcctcactaaatgtgttccccaaactgaatgtgatgcccagatgatctcgtagggcaatttccagcaaatgtctcataaccagcatgtcccttcacattgtttgtcaatagcctttcaagcccttaaagctcaacatttccagaatgtatggtttcccattctaatgataatctattttaataagttaccttaaattccagcttttcagtgtcctgtccccccaccctatcacagaccttccaacttagtaaccattctttctttctcatcatccacgtcatcaatgaaaattgtcaatgctaaccctgaattatttaggcttagtgtacttcattctttatttaatatattctttgttttcatgttgggcaccgagatgacccagggcttagataattctgtgcctccttgtagcaacacaaacctattttcaggcaaagatgggtaatatcttctgttgttaaaacacagtgaacacagttctgtagtgctgtgtaaacccaccaggtagccagcgagccttataaagagctaagttcctttgatgggctccttgaaagataaggaaccatcaagatattcctctggatctggttcacacccagaagggttataaccagttattaagagatgcataacaaatcacccagaaagttattactcaagataaacatcattgtacagcttatattaataagtttttgggacaggaagcagagcagggttctggagggcagcttgtccctgcttcacatgctgtcacctggactgggtctgaagaatcaaaagtggcctcccacctgtctagaacctcagctgagacagcccaaatgagtgggcttgcagacctctggagcctcgctactcttccacatgacccttgtctttatatggagtgtctcatcctccagggtctcccctccatgtgacctccctctttatattaggaagtttggattccttcttatgtctgctgggttccacctgagcaaaattagaagcttgaaagacctccaaagggtcaccttgaatctcccaggacattacctgcattgctttctattggtcaaagcaagtcacaaagccatcccagatttaaggggcaggaagagtccctacccttgaatctgggagttaaggcaaagttgtctcacaaatgggttgttgacatggagaggactgatttattggagaccttctctttttaaaatttagttttagtggacacataaaaattgtatatacttatgttgcacaacatgctgttctgaaatatatatacaatgtggaaatgtacacaatttattctaactgagctaaattagataaagctaattaaaatatatattactgcagactcattttttgtggtgtgaacatttaaaacctatgcttataatgattttcaggtatacaatacattgctattaactatagttgctatgttgtacaatatatttcttgaatttattccacctgtttaactgaaagtttatattctttagctcgtatctctccaatccctccacctgtcagccccaggtaaccaccattctactctctgcttttatgagttcaagtttttagattctacctatgaggctgggtgcggtggctcacatatgtaatcccagaattctgggaggtcgaggcaggtggatcactcgaggtcaggagttccagaccagcctggccaacacggtgaaaccctgtctctactaaaatttaacaacaacaagaagaagaacaaaaaacacaaaaattagcatgtatggtggcacacacctatagtctcatctacctgggaggctgaggtgggagaatcacttgaacctgagaggtggaggttgcagtgagccgagattgtgccactgcactccagcctgggtgacatagccagaccctgtctcaaaaacaaacaaacaaacaaaaacgttttacatatgagtgagatcatgtggtatttgtctttccgtgcctggcttgtttcacttagcgtaatgtccttcaggtttatccatgttgtttcaaatggcacgatttcattgcttttttaaggctgagttgtatttcatggtttatacatattttctttattcattaatgctttggtggacacaggttgattctgtatcttggctattgtgaataatgctgcagtgaatatgggagtgtagctgtctcttcaaatattgatatcatttcctttggataaataccaactagtgggactgctggatcatatggtagttctatttttagttttttgaggagcttccataccattttccatagtgactgtcctagcttatgttctccaccaacagttcataggggttcccttttctctacattctcaccaactcttgttttctttcatcttattgaaaatagtcattataacaggtatgaggtgatacgttattgcggttttaaattgcacttccctgatgatcagcaatgttgagcattttatcatataccccttggccatttatatatcatctttctttgttgttgttgagacagagtctcactctgttgcacaggctggagtgcagtggtgcaatctcggctcgctgcaactgctccctcccaggatcaagcgattctcatgccttgccctcttgagtaactgggattacaggtgcacgccaccacacccagctaaattttgtatttttagtagagacggggtttcgctgtgttagccaggctggtcttgaactcctgacctcaagtgatccacctgccttggcctttcaaaatgctgggattacaggcatgagccactgtgcccggctatatatcatcttttataaaacaagtattcaagtccagtccccattttttaattagattatttgctttcttgttattgtattgagtctcttatgtattttggatattatcagatatatgatttgcaaatatttcctttcattttgtaggttgtctcttcatgctgttggttatttcctttgctgtgcagaagctttttagtttgatatcatccatttcactatgttccctttattgcctgtgcttttcgggtcaaatacacaaaaattatttgcccagaccaatgccatgtggcttttctactggggaccacttttagcatatatcactaatgcttacccccaaaattgcaccagtggatataatgctaggtcttgataaattgctcaactcctaagtgcatgcatagatattatatacacaaggtctcagagggataatatggtaagatggctgctctgatcccagtttaatgcatgaaagaccctgttacattttcccagggtctacctctgctcagtgctttcagaacataagcatcactcagtatgaaaattattatttttactagacaatatacgccactagattctcagttcctgggggccatgggctatgtcccattcacctttgcatctcccatacttcatggcttctgttatacgggagccagctgcccagttgaaaaaccaaaatagctcaacttgaataatacatattttgtactgaagcaaattaaaagccttgctgtaaccacactaaattatttcatatgtctctgagatcctagaatctattgcctaggtctgttactgggtgtgcctgctgacctcatgaatatcagtcattttaggaaagatgatccatccattgaatcaaaatggaaatgaatttgaagcaaacagtgccaggagtgcaaactgaggagactttcctagaggatgacagcacagtgagctccagtcaaggagggaccacgccttcctccactcactattctatatccaacccctggcctggagcctggtgtatgacaagccctatgtgttaaatggagtgttggcaatgatagaactttccggagaggatatctaaaagtggaattattccctgtgtttatttaagtgcaattcaaagagcaggtttttcagagacacacaggaggagcctggaaaatctgtgacgtgttaagggacttgtgctgtattaaagaaacaccaggtttccaaggaaacccttttagccttgtgcttaatgtttgctcttctgccctcaagaggcccagtgaacacacaattgtttataactagtcaagagactggatcttaggaaatcacttgcaaaattgtccaaaattcctctaaaatctttgatctaagagatctccaaccgcctcttggttcacagaatctgaaacagtatcttaactgtttcactttgctatttatgtacatttccagaacattttgcaaatgtaaagtgcctcgtagcagcattttgtttgtaccatagatgaatccctttgaagttaacctttattgaggcaattgttaaatgcagtatcatgaacttgtgttcacagaagacaggaaaagtgtaagctataggtctgaaataagagagaaataagagagtcagcaagggacacagcagtccatctcagggctttctcatttatgttaaaaagggaattaacatagataatctatgtcagtttcttggcacaatgctgaacaggtagttcagtaagttgtagccatgatggtgatcatgatgatgatgaatgatttggaaacagacatgcctgattttcatattattttctaagatattttcttcatcaaatgttctgaacacttaaaacttaactgctgtatgcttgtcacaggcacattcaatactcaagctttattaatgagcataatgtcctcatcagccattcaagtctagggccttctatcacattttaggctcaactatcttcttttgtgattttgtcattggtagcctcatggtgaaatttatggctctacagagagaagggcatgtgtattgtgtgtgtgtgtgtgtgtgtgtgtgtgtgtgtgcacatgcatgcttgcatacatgtatgtaagcatgtgtgttgatgacaatgattagcctgccaaaccacccatgtaagaaatcggctgtataaggcatagtttgttaaaccacaagtctgattttaaggtttccaaagaaaattccactgggcattgtctttaatttattctttgtaaaatagatttactctgtagtcccagctacatgggatactgaggtgggaggatcacttgagcccaggaggcagaggttgcaatgagctgagattgcatcactgcactccagcctgggtgacagagtgagaccttgtctcaaaaaaaaaaaaaaagatttactaatcacctggacattaaaaaattgttcttttaaaatgtacattctccattaaagtatgctagttcattgataccttttcctttttaatatttcaagggatcactggaaatatatagtgatgcttttaataattatgtcctttctaatcattccacatcattgagcgtgttaagcacacatgatgtcagctttggtgcttgatagaaatgatacaaggttggcatgttattggaagtgcctgctttcagtgtctagtgaaggatattgggaaatagttaaatgagccagaatagggaattactatgaattatggggtgggggggtataatcttgcttccaaattttctcaattgtgttaattcattttttcctgtacttgtctctcttaagtaatacaaagaaataatttattgatagctattgccttactctgagttttgatatgtcattaaaattaagccttaaaactttgtattttgaaaggtcaaaaaatggttagtataatgagaacctgacttcctaaacctaaaattaaaatgtatctcagaatcaattgaatttttccttcaagaaattgttgttaaatcttcctctcaataaattaaaaaaaaaaaaacaaataaaaaagacaatgtcaattttgagttaagtgccattttttttaatcctgtttatctacaaggagccacagtctgcctaactttaggtaaagaaaagcagtatcacttggaaatatatagatagtttactccccgtggaaaaaatcattatttctccatttagaaataatttcacatttaagatctctagaactttactttttccctaggcagatacttgttctaatgatctgagaggtaaaaactcttagcttagcttcttcttaggaatctaataccatttgtcttaaaaataatatattttagccgggcgtggtggctcgagcctgtaatcccaccactttgggaggctgagacgggcagatcacgaggtcaggagactgagaccatcctggctaacacagtgaaaccccgtctctactaaaaatacaaaaaaaaattagccgggcgtggtggcgggcgcctgtagtctgtagtcccagctactcgggaggctgaggcaggagaatgacgtgaacccaggaggcggagcttgcagtgagccgaggtggcaccactgtactccagcccgggcgacagagcgagactctgtctcaaaaaaaaaaaaaaaaaaaaaaaaaaaaggaataagaataataagaataaattttacttgaccatttagaaatcataaatgttccctgtcaaccacacggggaacttaaaagggggaaacatttgattattgtccagtgttgctctgctcagttgggtgtaaaatatagctagcaaggctgggccgacttctggagaaagaggaaggagagctggcaagacgggcccatggcaggtctccaggtcagcagcctccagaggggaacatggggcccctttggaaggccctggcttgggctgggctttgtgctgttctcttgaccctggtgggaacatggctgtaagaataccatccctgtctactctccttatatcctttgtaacatatgattatcccatctgcagcacattttaaatcacaatgccaaagtgcaacagtcctcaaggagtggtccctgcacgcttgatggtctccaagaccctttagggatttgcaaggtcaaaactactttcaagataatattgagatatcattcactttctttgttgttttgacatctgcaatggtggataaaattgctggtgtctcagcaggtgtcaaggctgcgggatccaattatacttgttttgtgtaaatagtgtactatattcttcactgctacacactaacagaaaaaaaaatccaattttattgagaatatcctttatgcagccatataattattagttttattttatctcaacccttgagtatatgactttttaatagcctctgtgaggaaacaggaaatgtattcccataaagtgtggttattttgaggaaaagcatttgagtggttgagctgcaagctgaaataatccttttcttaatagaactttaaaaaagttacttttcctgttactgttacttttacttagcggaacaagggacagaaaactatggtaatttggactacagatgacagttattttctcaaagtatgaaccaaggtgatcctgttacttcaaggaaaataaccaacagtatttgattcaatggtaaaatttttcaaacaaaaattcaaattgtggaaaaactgtatccaccattatgtacttgacagcctcccaatatttaaagaacttttgtgatgagatcagtgattatattaacaaatatgattttttagtgttatatattgaaacctgtcaacatttgaaagatctgcataactcagtgaactataaatgactaatgcatgatgttacaaaagtcatgcattagtaatagatccatttaaagctcaagatagggcaatcaattttaacataacagagtatgaaaataccattccaactaacctttaagaaattaccccagaaggccaggcacagcggctcatgcctgtaatcccaaagctttgggaggccaaggcagaaggattgcttgaggctaggagttcaaaaccagcctaagcaacatagcaagaccttgtctctacaacaaaagtttttaaattagctgggtgctcatgccactgccttccagcctaggcaagaaacccagaccctgtctaaaaagaaagaaagaaaaaaaacttacctcagtagaatattcacaattacttacaaagactattaaaacactcctttattttccatctacatatctctgtaaagcctgaatgcagatgcagatatgagaattgagcattctattagggtagacgttaaaaagatttatgaaaatataaacaatattactcttctagctatttttttgttttggaaaatacaatgttttcattaaaatatttttaaataatgtaatggggttactatttcatttttaaaataaatacatattttaaaatcttttaagatttctaccacactaaatataaatagctacaaatcacataatgaaacctctttatggtctccaataatttggaaaagtgtaaaggggccctgagacctgctgcacgggaggaaggtgctcccggaacagggagaaaggttgagtctggggaatgctgaccatgacacctgcttcaaacacagattccctgtggctgtttttcctctaggattctgttaaaaatcctgttgaagaatccattccacatatgggtaaaatttagaaatatgttccctggaactgggaaatccagggacaggagaaaaaagcagcaacattgctttgttactttgttttacttgctacatcagacaaaaaacaaaaaggaatggatataattattttacgtacctcttaagggcagtgtgaggtttatgtgagtcaacgtttataatgcacttaaggcatacttgtcactactaagtttatataaattcttgttaaataaaaatgaatgaatgaatgaataagcagcttctaacagaaaccgtggcagcattttttgctgagcacattgctaggcagtaactaaattaatatgatgcttgacctcagagatttaggaagttggtccaatctaggcacatgcagagaagatacgtttagaattctgaattttgatggatattatctcaaatatctttctgaaacacagcgaaatataaagacttttataaaatcagatagcatgcacacaggaattgacaatccaggctctccagtttaagtaggtggatttcctaaagaactctaaagatatttaggaactagaagtgactcagcttccaatatagaaacccttttccacccatactctcaaaatcaatgtgaaatagctatttgtagatggaatctttggactcctatgttttgttttgttttgttttgttttgttttgttttgttttgtgagacagggtcttcctctgtcacccaggctgaagtgcagtggcacagtcatagctctctgcagccttgacctcccagtttcaagcagtcttcctgcctcagcctcccaagtagctgagaccacaggcatgtgccatcacacccagctaagttttctatttttgtagagtcaaggtctggctatgttgctcaggctggtctcaaacttgtaggctcaagctacttgcctgccttagcctactaaaatgctgggattacatgtgtaagtgactgcacctggtctggaccccaatttggctgaatcattcattcctcaagcaacaagtacttacatgggagatacaaagaaaacaatattgcctcttcttagaaagaaactcctaggctgggtgcggtggctgacacctgtaatcccagcattttgggaggcagaggtgggcagatcccgtccctactaaaaatacaaaaattagctgggtgtggtggcacacacctgtagtcccagctacttgggaggttgaggcagtagaatcgcttgaacccaggaggtggaggttgcagtgaactgagatcatgccactgcactccagcctggcggcagagtgagactccatctcaaaaaaaaaaaaaaaagaaagaaaaaagaaaggaaagaaacttctaatttcacagtggagatttcagtgtgtatgcataattccaaagttagcggagcagacagagcaagggtgttgggactgtagagccctagaggctaattttaagtccagctccaatcattttgtatctgtgtgacagcaagcaagttatttattattttaaacatgggatagggaattgggggtattttgacattttaggaagaggaaatgaatggtgtgagtgagcacaggggagaaaactgcaaggtctgttgggaaccatttggagtcaactgcaaaagggatccgggctgtaggttaggatctgggacaaggtcatgtttaaggggaccttgaacttcaggatgctcagaataactgaggaaccattaacattgggtcacttcttaaaatgtctgaatcaaagtgacatgtcccctaagagtgtataagtgcccagagcatgaagattccgtagtttgtagacaggcccaggaccagggaatttaggtaagttttttcagcaatagccagcagaatccaaacatccttaatgaggtactgtgtgcagcacagcctcctaaactacaagcttactctcaaaagtgtaagttgacaaggagtaatgctccgggtgctcttagagtagtggtagaactagtggcagtagtggtggtggtggtaattgttgcagtagtaatggtggtggtaataatggtatagcaataatagtaaaagtagtggcagtagaagtactggtagtggtagtagtggtggtggtagtattagtggtagtagtgatgatagtaggggtggtagcagtattggtaatagtagtagcatagtagtggtggtagtattagtgatagtagcagtagtggtaatagtggtagtagtagtaccgccaatagtaatagtggtagcagcagtggtaacagtagtattggtagtgttgccaaaacactaggggttcagtctaggtcctactgctcgccacatgaatgccaatcactgagtgttttaggctgttcttgaattgctataaagaaatacctgagactgggtaatttagaaagaaaagaggtttaattggctcacagttctgtaggctgtacgggaagcatggcattgggcatctgctcagcttctgggaggcctcaggaagcttctcatcatggtggaaggcaaagggggaacaggcatgtcacacggtgaaagcaggagcaagggagagagtgagagggagttgccacacacttttaaatgacaagatctcgtgtgaactcagagcaagagcacactcgtcaccaaggagatggccgaagcccttcatgagggagtgaccctcatgatccaatcacctcccaccaggccccacctccaacacgggatcacatctcaacatgagatttggcagggacacagattcaaactatatcactgagacaatgattattgccagtgaagaagactattctggtgctgcagccaaggagatagaagatcagtctcaaatccatctctcagattgattaaaattggggtttttataggatgaaagcaatgtaaccatgtgtgggaaaacaggaattagggaagggtaaggaaaaggagtttgtcaataggaagcaggtggtcagttaggcaatcatgataggtgagggtctggtacctcactgtctagatgtggtgatctgggaagtttcagttctttgatgttatctgggaggccctcatggttagtttcctaagaaaaggacttagataagacaaatgtaattttgtcaagttgtaagactgggagggtcaatttctatgtttattcaaaagaaactataaacattaattctataggacagttgggccagcatcagttgtagtagctgtggtagatggtggtagtggtagtagttgtggtaggagtggtggtagtagtagtagtagtagtagcagcagtggcagtagtaggggtaataacggtagtagtagtggtagcagtgttttaggggcctgcattctccagtattttcctcacagaccagtggccacaaccatttccagttaagtgttccgttcctggtgggcacccagctcaggaacactgcacgtgtgtactgtgagttgccccccatctgaaatattcttcacctgctcaccctccattactgagctgaaacttccacaacaaaccaacagcctccttgtgttgggaaaccgttcccattacagtagatattaacgagccctaaatccaatctaactgaatttggctaattcctaaagttaggattttctcagaagttggcgtgatggtgaagaatcccttttctctggtacccgttatggttgacaatcagtgaagttttcttgtgcaattgcatggcatttaaacattattttagcatatttttgtgaactaaatatactattttggaatttgaatttatcttttggtgagacatagtagcaaggaagaggaagtaaacaaaatctctctagtgaattaaaatataaaatggtaaatgtcatctcgatttaggaaccctgtcggcggttcagaagcaaaatgagctgccctgagttggagcctccatgggacccgcttccgtaggcacaggcataaagtcagctttctgttgctgaaggcttggaagaggctgcaggagaacactgtaatcagatttgacattccgaactgatggctgatgggctgtgagggccgtggcagggagtgatttcaggggctttaataaggcttggcaaataaatgatcaggtcacactgtcactgtgtgaatgccaatgtctttctccccaatccattccctgagaggactccagggccaaatagaaaataaatttaaaatgaactgtgaacactaaaaaatctttaatagactttgtccatggaaagtgattcttttttataaaattgctttaatgcccattttctttgtgttcatgaatataaagagaaaacaaaaccaatagcaaggtctcagtatttctgatttttttttaagttttgtgatttaagaaaaaaaaagaaatcaaagatacattccttgcgaaggcaactatggaatctacacccaaatctccaaattatattcataagtcaattgtaactaattttagtattcctaaaagaatgaatttacaaattgctctcaacccttttagcctaaaatataggaaaatgttacagtctccaggtaggaaaaaaaacatgcgtcattttacagctggataccaaagagactcaaatttttgatctaaaagaaaaaaaaaaatacagaaggaaagtaaaaatagacctgacctttgaaggcagaaatttcttgtctttaaatttgactttcattttctttcattaaaataaaaataaaataaaataaagaatgccccctaatagtctcttctcaagttaaaaatactgcaccacatcaaattatttttggaaccagccaagagaggaaagggaggaagaagttaaaatacaatgctatcatttcttattgaagttagaattttcataacaatcttgccaatgtttttcgtcaattacactgactgaacacagtatatttgtatcaaacgacattgtttgaccactcaaattaaccatgtaaaaattacctaattctacctttacttccttataaattttccttagagttcccttgggaaatatttaacatacagtaaagatcctgggattaaagttttaaacccctctgccatctaagactgtctgtatttctatcctaatctctcttagtactccccaattacacacaaaggatccaagtctgaactggtatgccttcggttctacagttctcagtgttgaaaatctccctctcccctgtcttccaggtgatattcatccattatccaaaacctcagcccaagatcaaggctccctctagggaaaagatagcttggccctgctaggaagaattttctcactcttctgtaaatacttctgtgcagggtttgtgtggctcaatattgcatttccacttctttctggtttacctgccttggttgaagactcagggaagcaaaaagctgcattcccagacatagctgccagggctctggaagcggttaaaacgcagtcagatgcattgtgtatgtatggagacttgagagactctgacagcctgttgagtgcaggttcatattctattatttttcatcctgactgtataaaagccatctggtctgatgtggaagaaagaatgtggcattgggagtcaggcaagcctagattgtatgaccttggtcctcaacctatgcaatcttgctgaaactcagacctctcattcaactaataaaaagggttaggggaattaaatgaagtaatatgaaaaatgcctggactgtagtaagcaataaagatcattgttcttatctttatctcgcctcatcttcatattctaggtgaagtagataagtgtgaattcactgctgtatttagacccccacaagattgtcattgcattaaaccacccaacaactgccttgactattccatgaatttatcagtttgatgtctttctttaagaaaaagtatagatttgaccacagaaactttccttgagagaactgtattaaagaaataattagaaatgcagaaaaatatctatttggaaacttattttaattataatggtgaaatattagaaacactcaagaacagataggctaatccaattattatatacccatccaatggattattacacagtattaaaatgatgtattaaagcattcaaatgacaggtagccactcataatttagcaacattcatacaatattcattgagcacatgaatctcataaaaggatcaaataaaataagctgaatggaaagctatttaaataacagtttaatctcaattatctaaatactatatatatgtagaaaaaagcatagacggatatatgcaaacatgttaataatggtcagctctggtgttcagctgttcatccttggtaatggaattatgtgggatttatattttattctttctagtttttatttttcagatttttcacactgtgcctatacttgtagtcagaaaaaaatgtaagttaaagttttataaaatgataatatggatttcctattaccttgattttaaaaaaatatgcctataaaaacatatacatttagtaaagtggctttctagaattttcgttgtattttctcctccaaagcacaagctcacaaaagggctgggaacatgtcttttcatgtttaaatcttaatgaagactcatccatgtattccctgttcgtggagctgttatggattgagtgctgctccgcatcagaggtcatgcacgtggatctggagattcctggatgatgaaggggaaggtgccagagcctttgggtatggctttgaagtgggagagactgagaaatcattacctttctttggcagtatacctttaagtctgcactctttagatttgagggcattctaaatctttcatccaagaagactttgtggtctcaatttggagccgatattagggaaccagcctttggagctgcgtgcattaaatatgggcttacacttgatgtcaaggaagcaaaatttgcctgatatctaacatgcactaataattctgtacatgtgtatcagctcattgatctttttagtacttgatttgggggttgaattgtaaattttattatatcttttgaatgtgttaaaatttttttcatgattaacagttgaccttgtggcttcctaaggagctctggccaagctgtgtcatgctttgaaaaatttcactgagttgtggacattgcttctgaggttatattcactgtactactgctctttggtcctttatgggaagcatctcttcaatagcatcttgcagagcttggcaggacctgggggaaatgctcgtgtttgggagtagacccagaggcttcaccgttctgtacgtggtggcttctttcccttctgcgtctgagatacataacacattccccatcctggaattccaattccagtgttacaagaacttgtgttctacccttctttctgacctcgaaggatacttacaataaattcatgtgattattactttctacgtcgtgttggttagtttcttaggaaatcgttgaaaatatatgctttacaggagtaccattttctaatccactctcatcctataactatttaaaaaatacatatcattttaggaagagtgtggcctatagatgaacctctgatctgactatttgaggcttgttttattgctcttagatttttccaaatatttatcaaacactgtttatctttaacccacactagaataatacatgattattattcttaatacctgtacataaatatcacttataggcattaatttttatagtactaataggtttgcatgttcaggaagtactgaggattaaaataaaggaattcctctcatttacccaatatttgaatatgagatttaagatgtgtgttggatgccagacgaggatatgtagaataaccatggagataatgaaggaaataagaaatgacttttgaaaagactggtcaaggcaactaccttatgaagactcagcctcaggtgggtatttcaccggcgtggttcccacagcccgaactccatgctctttttcacatctgcttcccccttggagaggtgctttctctctgggaagaaagaaggggctagccaaacttcctggcgtgtgagatgacccagagtcacattctaatgcctagtctgtgcaaattgtgtcaacataccatactcaaaatgagatttttgtagttagcaatcttctaatttttgcaacgagaaatttccgataacagcaatgtggtaatacacttctctaaatatttgcagtgagcaagtatgtattgagtgaacatacctgatgctatgtgggacactgtaggagaaatcatcatgcaccagtggggagacatcctgtcactgacactgctcaagcttacgctaacctgtagaaaaactccacagtatgaacaaccctggagagaaggataaatcatagtatgaaactgataaaattttaaaaagtccccttccaaagaaagaaacattgaaatgctctatggttgtattaaattactttcaagcacattgtatcatttgatcaaactaagttgatggttctctaatcttctcaatctgcattctttgcacgtaatttacattaactatagcactcttatttcaaacagcaggtgggtagactgtgtaaaatttagcctccctccagatttctatatgtttgtgtttatgcactcagcgatttttaagcgtaaaattggcttcttatttaaagccaaagtgagtgaatagaatactcattgctgctcattctaacagccatgagtccagcccctggtaaggcaatagctctcacctgtctttgtgaatattatttatattgcagcatttgctggtatggttggaccttcagggattgtttaaggagcacaatgatttcatgcggtctgcatcatccaatatgaaatgttatataccttgaaatatttttccatagtgagaaggtctccctccactccctacacttgcaaagaaccatagatacagttttctttcttttattttaagcttgttgctacctgaggtaggcaaggaatgagctgctttgagatgttataatagattcaattgtgtcccctcaaatgatattgaagctctaatgcgccagtggctcagaatgtgaccttatttggaaatagggtcattgaagatataagtagttaagatgaagttgtattggagtaggatgggcccttaatccaacatgactggtgtttttgtaagaagagggaaaacttaaacacagagagaacatggccatgtgaagatagaggtggagattggaattacgctgccataatccagggtcattgaggcctaccagaagctgggagagagaagggaagatcttcccttgaggcattggagtaggtacggacctgccaataatactgctggcctccagaaatggaaaagaataccctgctatcatttaaaccacccggtttgcagtactttgttgcagcagccctgggaaaataatgtggatgccacatcagaaggtgaagccaagagcacagcacggaatagggtgcatcagcaatcagctaacccaaggctatccaccttctctccatgaattattcaggtcttatttttgtacctgtcagtttttaaagggagattgtcatctcttgattggctattacggatccatctaaaatggttgctgtctaacagctgactgatagactccacactttttacccctgtgcagtgaagaagagtcaaaagaacaaaaatgtagtttttgattgaatactaagatcagactcatccacctgctgagcaggtctgaataccactgcacatgcaactgggcaagcatagtcaaaggaggcttgattaagcaaaacgaagctgagacagctccagcctctcccttgccccaccctgtccatgcgtgcagctccccctccaggagatttgaaagggacagggtggggtggtgggggaatggatagacacaggatgagcaggtgaccaaggaggcttattctcaatgatgcctgatgagaagaaacacccagacttgtagctctgaccacacaatacgtcctcttaggatacattctttctcatttattccccgtgtcctcacgtccacacctgttctctcacttttgcatccttcccaaatctgtgttcttaagttttctcttccttgatgcatgaacacgtggcatggccattgggtaggaagcaatgcaggcaaacaagtcggccagtgtacatgaagatttctcgagagtacttgtccattctgcgatggtaacaggctatatcttctttcaaagacaagagtttagggtgtggtttatcactcttttcattaacctgagtcagataaatccagattctgatgtactttatgttttagatggtaagctctttgtcaacttggttcatatggttaaaatgatttggagaatttaacaaataatttaatcaatatacctggacagtattaatgataaaaatcctattatggtaattcagcatagattttctataatctattgtggtactggccaaatacagtggatatctttggaatgtgccagaaagaagtggtgcccactaatcagatgtcttttttagaacattagctgttttttaacggtcctcttttttgttatttctcttcataaaatattggctatttaaaagaatattctctaattaaaatttaatgtcaggaaatgaaagaaagatggtttcaatgctagacatttataatgacttttgatttccttgctcaaatgacaagtgaagttttctcagcatgacatgagaataatttatcagaagatataaaaatgagcaaaatgtacattggagaaaacccttttgtactctcaagaagagagcaaattatcttaaaacacgggggatttctattcatcttttatgcaggaatatcctacttttattaaatacatgttgaattacattgagggaaagagtaaacttaccatattgtatcccacccatttctaaatggcacagggtagttacactgtacactacatttactgtaagaattgctaagaaaagccaacatgaaatgagcatgttctacctggaatttataaacaattactaagtgggaaaatgtggggagaaaatacagggaatgaaattaaaaagcaagatttgcttacccagagtggtgaatttataccaccctactccaatagggtatgtgcatttgaatggattgtaataggttttagtaggattgaacacactttccagaatgtgaagtttgcagtgcttagagttgtatcaaatattttcaaagaacacagctggtttatcagtggaggagggggggtttaaaatggccttaactcccgtgattttcctatgaagattaaatagagtaatgaccatgacagccttatggaaactgtaaagagcaaggtctggtttctcaaacagtaaagagatgcctgccaggttaagatgtgggtgaaatggaatttgtggaaaagtgtcaaaagcactaaagagattgcttttcttcacccacaaatacagcacgctgacctacctcataccgagaaacacaggacttcatgataccatctgctgtgatctccctcccatctgaaatgcaattgtcttccagtgttctagaggcatctaactttttatatcaatcatatttgccattattatcactttatacagtcattatttgtttagggttactcacgcatacctcgttctttctccacccttctttttgcatctcattattgagtacaatttcttttctggaagcacatcctttagttccaggcgcaagcctgctattggcaaactgtcggttcttatcaatactgggaaatttccaaattgttttcccaaatattgcttttctgccatttttttctaccctctccttgaactgtggatttcctctatctctccttcaagtctcttaacctttctttcatatgtatctttctttcttccatatgtttctttttctctctaggaaatattctgagtaatttctgtagatttattttcttgttcactaatttttcccaactgtgtctaatataaatatttatgtcaagggttatgtgttttatttctgcccattctgcaaatattttattgtttatctaatatttgtatcttttatgatatactcttattcacttatcctatttttaattcaattctatagttttgcaacatttaaaatacttattgtgtaaacattgtcgagttatttcattgtctgaggcctctattgcttcttctgactcctttttatgataaattgttctctaatgtgttagaggtttggtactggaagctcaagattggaagggaggagtcaagcttcatctgtaaacatttctcagtgctccttcctccagggaagatttatttgtctttgcttctgccagatgtccttagaagcgaagtcactatatgttattttctagagtgaggtctactggaccctggagacagtgagactacaaatcccaaaccagagcaaggccagtactatggttagacataatccctacacaaagcttaggctaggaaggcaagggtatttgcaaaggctgtttttttttttttggaggtccaatcttttagtgaagttgtacttttctgcagacttctcttgtgtaggacttgtgtaggactaacagccttccatttcctcattgctgttaaaactatgttttttccccctaaatgtgcaaatgtcacagggaaattataggtagtatcaacaagatctttgctgttaggtattcaccccccctcttcctttatagagcccagagggctttccttacctgagaaacctgctgttcatttaagtcaatgttagatttatgcagcttgtctaagtttcttatacctggagagttttcaaaataattagttttttacatagtcagaaatggaagttgctacaactcactgctgattcactgactatattaaactacctgaaaaaaaaatggaaaaataaggttccaaataatgtaatctgacatacatttcatgagagaaatgaccaaaacttaatcctagagggaattttatcttaaaatcctagagggaattttatctaaagaaaattcattagatggttgtaaagcaaaaatgaaattaaaaaataatataaataaacgtggagttcaagaaaaacgtcactgtttccacttttaagtggagaagtaatttgacaaattttcattgaaagaattttgctgatcacgagtttctatcaaaacccaagaagtgtaaacataggaagtgcttataggttaataaagcaaaaatcatgtgttattaacgaggaagtgttaaggtggtgccagatccacgggcactcactatttcatttctgggagcgtttttcagcctgcagttcccacaccacgcgtgccgtggagctctctgtgccacgctgcggggcctcggtctgaccagcagggggcaccgagtgttctcccgcagcggcccggcgtgggcggcggctccaaggccgattcctcagcaccaggcaggtgcctttgaagcaaagggcgttcattcacattcacaaaggtctccggaacagccttgtaggttcttcaactgccctcaactaaagcttcggaatctgaaaacctgggaagaagcttagtgtcctgacagtattttccttttaattttgcaaagtttacaaaatccattaagaattgctttgcaatgaaaaatatacacatttttatactttttgttttcaagtgcttcattccatttatatttagcggtgaggcgggcctaggcaaaaatgaaataaaagcacagtgttaagatctgcaaggccattaaattgcagtgcacgtaattaatggaccatgatattgcttaaacacaaatgtacactaatcttgatccagcggtactagtgatttgttgttacagggctagatccacctaaagctcatggtgaacacttacaaccttgcacagaaagtgactgtgcttgaaagcacgaaggcaaaatcccattggccaaagataccttgtattcctagctgtgaatcggtttatcctctttattttatactttgcattattttattacttggaagaattcacccacttttttctgacaaaggcttatcagatttttcttcttaaaaaaatatatataaagttttgaagaaaagacaaagcattgcaaagagctgtcagagggggacgagaagcttacaaagtgagcaggtggcacacagcctgtctgcagtggtcatgtgagagccaaacccctcagccacattaacagcctacagcatgtgccaagcccttaagaagtcacatagcatttcagagaatcccacaaaaccaaaaacacaaattctgtcaatgcaatacatatatttctaggtagacgtattagtacgtctcttatgtgggtgccgaggaatcttgtaaaagtttgtgcaaaattgacgtcagttttactgcttgtcagcagtgaaatgagtggattcattgattcattcatttgacaaacatttaatgaaccactactctgtatgtgttctagggactgggaatacagcattgaacaaaatacagaactaaatgcatgcttgatggagcttttattgccatggttagcatgagttacattcataaaatatactttattttcattaaaaagaatgagctagatttctttatatcaacatagagagatcttaaggaaacataacgttggatgggaaaagtgagtttttccatgagaaatagtaaaatacttatgtaagtttgaaaaacaaagagaaaatacagaaccatactatgtgaagttcattgtcacagctatgtgtgggagtgtgtgtgtaataaaataaaaagtcgaaactgggaatacacactaatatttctgataatagggttttttaggagaaaaatataggatggggagggaacaaagagaaaaataaagcattttctgtaaagttttatttatttcattaaaaataaataaagcaaattacaccaaatgttaacaatgatcaattttaagaaatgggtacatggatgagtatgtcatgcctatgtgggtgattggtactttttcagttaaataaataaatggcagttggaggagggacagagaaggacatggggagtgagaccaaacaaggatcatgatgagaccagaacttccctagaggagtggcccgttgtgagcctgagagatcccctgtagcgacactgagcagagctccctgtgcctctttccgtcctggcctcacgctgtctggttggctttcccgatccgtcgtccatctctgttgtcctgttgttgttgttgtggttttgagatggggtttcgctcttgttgcccaggctggagagcaatggtgcgatctcagctcaccgcaacctccacctcccaaattcaagcaattctcctgcctcagcctcccgagtagctgggattacaggcatgggccaccatgcctggctaactttgtatttttagtagagatggggtttcaccatgttggtcaggctagtctctaactcctgacctctgatgatccacccacctaggcctcccaaagtgctgggattacagctgtgagccaccacgccaggccttctgctgtccagttttagtaacagctttagcaactgccttgctctgctctcagcattctctgttttaaccatcccgatttcacctctgcctcccttatgtctaccttttgtctcacagtctgacaatgaaaatcatctgccactatcctagcaccaacctgtgggcctccctgaactcccacttacctgggccacgtcagccctgcagcccacggagctcctccagggggtgcctctcctgtgtttccttggctgtgatctccaagcagagggcaggccaactgcgtgtttcctagtccccctaagtagcttcatctttccctcctagcagtagacccctatccctttctctaagaaacactgtataacccacctcttccaggaagcatcgtgaacacagtacttctcaaatctttgtcattcatgaactatctttatgatatctgcaatcattgaatgccatctgtgctagtgtttttgtcctttgaataattcttgtttacttaaaacaatgtaattataaaaaaatgcattactacttttaaatggaaaatcagtttaactagccatacagataaatgcaatacaatgaaagaaaaacaataatattaaattctagtcagatacaattgccttccaaagactctaaaccagcggtttacttttcctttgtctaaaaaaaaagaaaagaaagaaaaaggagactaagaagtgttagagcaatagtgaagataacttacttctgcaaaaacgtgctgagaattctagtggaggcacctaagtcagtgagtggataactggtaccttctgtggctttccctttgaaagaatcacaagaattgagatttacagaggagaaaaagtctcaccatgtgtccggatatcatttctctatagcgtcttatcagctgcataccatcagtgggttccactccattttaattcatcatggatatatcattttcttttcttttcttttctttttttctttttttagagggagtcttgctgtgtcacccaggctggagtgcagtagtggcatgatctcagctcactgcagcctctgcctcccgggttccagcatttctcctgcctcagcctcctgggtagctgggattccaggcgcacaccaccacgcccggctaatttttgtatttttagtagagacgggttttgccacgttggccaggctggtgtcgaattcctggccttaggtgatctgcctgcctcagcctcccaaagtgctgggattacaggcatgagtgacctgcccagccagatatatcatttccaatctctctttacatcagcgcttacgtatatccaactgacactgtttgcctctgttttgcaattgtttgcacttttactttatggtatgtttcctttccttctcattaggaattagccttttaggtaacttggattccattactaggtctgcatatgatgggcagttgctacatgattttattaataccattttgttacaaaggttattgcaaggcaatggagtttgtgataagctagatctggggaagtcatttagggaattgagttactctcacagtgcaaggctctgtgacatgaaagacagtctcaaagattctcatggggtcagactatttgaaaccaaaaggcagtggagtgggagtgacacgagggaccgcatctgacatggtttctacccttgcgtgttcttgtaagtatacatatttgcatgtacatttgtatggatagctcagtaaactcattatagtttcctttgacatcatcacgtgtcattgggaaacaaatgtaatccaagaccttcaaatgatgttgcagttttaaaaaaataaactgctttctctgctattcccattataaatgcaaccaagcctatggccttatagacttgctggtctcaaagcatgtgtttgaggtgggaaaaaatgtgtcatgtccaaggaaatgatacaagatatactttgaaaatagaactgataggacatagaattggcctgaatgtcaggatgaggcaaaggagatgaggaccaaggcggctgctaggtcttggtgaggagccctgaacaggtgaagagtccccctaccaggaataagaactaggggacttgctaaagcaggaatctttaatttaaaatgcagaaatatttaaagagagaactttaagaatccaaggtataccagctgatgctaaaagacgattagccttgctttgaaacggaagcctagtcagaaaagtaacaattccatcactaagatgttgaaaaaggctcttcaaacattttttgctctgactcacagtaagagatacatagaataaagacattttatcttagaactcagtaatgcatacacataaatacacacataaatatacaaacacacacataactttatgtatgcacaggtgtactgaaacaagctgcagaatatttatcaccactatttgatacacactgatacattctatgctcttttatttcatttttttaaaaagtaaagctgcaatccatgaaactgatttcacaacctattagtaggtgaacccaaagtgtgaaaaaccattatcccataatattaagtggccacaacatagtgttagtttcattctttatggtggttcctatttttccagattctttcccataatcctatgccatctgtatcaggtagacaaactttacagttaattttcaatgtgttttgccaataagcccagtgtcttaaattccttttgggttgctaacacagaccaggtaagcatagtcactgtgggttgaagtgccgtgctctgaccttccttcacttattttttcctttttgtatgtgttgctttttaatcagcactgtattgtgcacccacaactggaacagacagtcaacctgaaatacacattcccttccagccccaaaatgcagaaatcttgtgggacagtaaataatgctgatgtacctcttctaaacatgagtccgcctgatacaacgagcacatccaatagcattctcttccttcccctttccatatctctataaagggctactttcaattccccaaagtccaaaataagtcagccatggacagccagtgccacaccccgtggttcttattcctggcaggaggactcttcacctgttcagggctcttcaccaagacctagcagccaccttggtcctcatcgcctttgcctcatcctggcattcaggcgagttctatgtcctatcagttctattttcttttttttttttttttttttttgagacggagtctcgctctgtcgcccaggctggagtgcagtggcacgatctcggctcactgcaggctccgcctcccgggttcccgccattctcctgcctcagcctcccgagcagctgggactacaggcgcccgccaccacgcccggctaattttttgcatttttagtagagacggggtttcaccgtgttagccaggatggtctcgatctcctgaccttgtgatccgcccgcctcggcctcccaaagtgctgggattacaggcgcgagccaccgcgcccggcctcagttctattttcaaaccatatcctgtgtcagttccttggatatgccacagtttttcccgcctcaaacatacttttcctttaaccttgttcttagctctacttatccatgaataatcccttcttatcttcctaccttctgtggctctgctgaagtgcacgtcctcagaaatccttacatacacaccccactccaaacccccaccatctaaacagctcttctctttactagagtcaacttctgtttctcaattcatgtaaatgcatttatgagagtggatttattttctttgtcaatgtactctttttgtctgtgttcccaactgaaatatttgctttcaaatgtcagtggccaaaaccatcttgttcatcgtataaataaataaatacaatttataagttttacgagcttctttggttctttaataaaaaattcttgaagtgattcatttaaaagtaaaggaattatacaattatattctttctaaggattcattattttaaacaactagaaatctaactagagcaaagattagtgacagacttgaatatctgcacaaagatctgatcattaacaaactaaatagggtaattaggtatacagttggaatgcagtatgcaggcttaaattagtagtgtataattgagcctcatttaactgcaggagaatttcactgagagaattttatttacataaaagaaatgtcttagtgaaattgctttgagagaatttaaaatatgtacaccaaatctctccttacatactggatccagcagaattgtaagcttattcctcatgccccatgtgatggtgttatttctagccaaatgatttcttccaggcggctcaagatccacgctggggcttcattatttcttggatatcttgatgatactctcataaacataataggctccaaagaaggttaaataaaatgatatggtgagagctctgccccctcaatatgatcccttattttactgatcctatttttagaaaaaaactcgaagtatgtatatcttctaaacagtcacttaatttagcactgtgcaaacctttgggggcagcaggtaagtggggcaaacaagaggatccctttgtcttcagagaggcaactgccattttgaggaggcagctctgacacccaaatcaactggactgatgcaattatgtgtgaaatggggaattatcacagaagttcaggaagagacagagatcagctacatggcagattcaacttttgtgtgaggtatttggaggggagggaatacaaagaccagggtgaatattgaaagtctccccttctgcttttaggcaagtccaggtagcgaccagcttgaaaagcaagcataataaaagccctctttgacgcatctactcccgacagcaacatcatcctaaatttatctccttctatgttgtgtgttacatgggtttggtttacgtctactgtgtccatatgctcaccacccactgacatctttttccaaaatacattttaactacccaagaagcacattaatagagtcttcttttaagatactcaaatacgtgacagtgggaaatgaaacataatttctcctccccttcctctaatccactcatgatttcagaggcaaccacagttaacatttgggcagatatctgctgatccaggcctctctgttcatttgcatacacaaatttattcatataccactgcctttggtacataacattacagattgttatgtaaccactttagactatgtagtggagatttttctgcagggtatgtgtacatataccttactgtcttttatgtaactgcagagtatagatgtaccctaatttatttacttatttatcccttgattggcattcaggtttatgtataagttttcattgttggccgggcgcggtggctcacgcctgtaatcccagcactttgggaggccgaggcgggcggatcacgaggtcaggagatcgagaccatcctggctaacacggtgaaaccccgtctctactaaaaatacaaaaaaaattagccgggcgtggtagcgggcgcctgtagtcccagctactcgggaggctgaggcaggagaatggcgtgaacctgggaggcggagcttgcagtgagccgagatcgcgccactgcactccagcctgggcgacagagcgagactccgtctcaaaaaaaaaaaaaaaaaaaaaaaaaaaaaaaaaaaaaaaaaaaaaaaaaaaaaaataagttttcattgttaaattatgcatccgtgcatttgggggtgaacgtcaaagtgtgcacttctgagtttttccataggataatctttgacgttgcaagagggattgaaaagtatgcaagtctcacacttgaaatatactggcaagttgcccttcaaaaatcaaaaggcttcaccaatttacatgcccacctatagaggtttttatttcccataccttttgtcaagaccacttattttcaaacattttattttttgttctaatctcctgtatgaaaagaatctctcattttaatttacattgatttgttcaagttctaagtaaattttgttcagcaattaattaaaacgtaattcatttcacttgtgaaaaggtgacatttttgcaatattaagttgactaatcctagatttggatatgcctcttcatttatccagggcttctattatgtcatttggtaatgacgtggagtgttctttaactcaattttgtgcatttctagctcttagacacttaatatttttattggttcagcaagaatattttatcatattttattacagattagagctactctaaagtgcttttctctgtcaggttcttacatggatgttcttatttaatatcatgattttcccaaaaaggcaatattgcccctttgtacaggttgtatatgtactcaaggctatggcaataggaaggcagggagctgaggccctttgcagcatcctttagaagtcctctcctcccctggctttcttagcgccacactggcttgtgtcctccatgcctcctctcactcctttcctgggtcttttcttggccttcttccttcactcgccttccttcactccccttcctggggagttactaaacttcagttctcatgaagggcttctcctcaacaagcatagtttggtctccaacgccctgtctgcagcttgacttttttgattttaactgactcagcatgctcacagctgagctcttatcttttctgaaacagaatctcccctaccccaactcctttgttctaccaaggccaccccaaccccataggtccctcagaatcaatacctggcatcttcttctcctcaccccagctctgttgaacctttaggttaaatttctttctgtgctcatggcttctgccccactctggttgtacctccgcttgcccatgccttgccgtctcacacttgtgccatggcccaaacccaggggagcgatttgcgtgagggcatgagccagcaagccagggcaccatcctggcacagatacttctagttgtataaactggggcaagtccctgaacttctctgtttctcaattttctcatctgaaaaatgggaataacagtatcttcctcttggggtcattgtaagaactaaatgtgtcataacataaataatgccgaaagcagtggtagcctccacctagaacctgttggctctgattaggattcatgttaatatccatgtctctatctaaattttccctttttataaggacacaccggtcacattggattaggggcacacactatccaagtatgagttcatcttaagatattacatctgcagtgactgaccctatttccaaataaagtcacatcccgaggtactgcaggttaggacattaacataaatttttgaggaagggggaaattcagctcataacgtcaggttagatgtcttctctttagggggctcttcttttctcttatatgcagctttcaacatgtgcatatttttatctggcaactcaattgctcaggaaatatctgtagctcgttcatgcctgcatgtaatcctttatatatatcatatatatgatatatagatatctatataagatatatatgatatatatgatatatagatatctatataagatatatagatatcgatatctatataagatatatagatatcgatatctatataagatatatagatatcgatataagatatatagatatcgatataagatatatagatatcgatataagatatatcgatatctatataagatatatagatatcgatataagatatatagatatctatataagatatatagatatctatataagatatatagatatctatataagatatatagatatctatataagatatatatgatatagatatatatatatcttctatttccacttctattttagttaatgctaagaggatcatgtggtttctaatgctatatacttagaacttagatttaattcttatgttcctctaatatttcagaaactgttattgaaacggctttgaagaaagctgagtttcatgacacagtgtggccatcaattggcgacggcaggcgcagctgagaaaagcttcatcgtgcttgtgctaccatttaacatcttattagcagagccatctcttctttcaattgctattaactcaattcatatagactgcaataggaaaaacacaacaacaagagctctaagatatatttctctaagtgaaaaatgacatatgcttttaaaatcttcccccaaatagtattgcctttactgaagatctaacagcttaaccacacagtaaaaagccagggagcataatgaaagaataattcatcacaatcttaaaatatgctcattttcatataagaatatattcatctctggaggagaacaaactctttttatgcagtctacatgaggaaatgtgccgaaatctaaaaaaaggtactttagctttctttttactgagacctaggaaaggatgttttgaatacaagcaataatagactgtttcatccacccatgcatgcattcaacaaatattttaggatgtcatagccaagtactgttctatgtaatggagatgaaatgttgaacaagacaaaatgagttcttgctattctagatgaaggagggaaatgttaaaccaatctcatgcacatgtacaagataacgtcacatacaggtataataaaaccaagtctctcatcatgaatgaccatgatcatgtgactttgctggaaatttgacttaaaaactgaggccaggatgacaagaaggacccatccagggagagatctgggctcagagcctccagtcagagcaattaaaagaagtacagcatggcctgggtatggtggaagaaggagagagtggagtggaagcttttggagatatggccaaagcccaaactatcatagaccatcataagtggttaggtctagtgggattccatcaaggcactaaatgatgtatattgctaaatgctcatgcatgttgaatagagattaaattgtagggaagcagaagtggacacagagagtttgaaagctacaatccttagatgtgtgtggtacagtgttgagggaggaaagtggatggattcaggatatattttggaggtagaagcagagggccttcctgttagataaaatatgatggacaagaaatgattaattttgagaacttcaggatattttttttatactcagatactaacagatatgccagggagaattgttcaagtaacatgataatgattttggggaaagtccctgagtttctgtgaatatccatttctactgtggaaaagacttctgaagataatatcttggtcagcttgggctactatcacaaaatagcatggactgggaggcttaaaccacaaaaatttatctctcactgttctggaggctgggaagtccaagatcaaggtattggcagatttggtgcctgatgggggctcccttcctggattgcagacagccgccttctcactgcgatcccacagggcggaaagagaaagtgaggtctggtcccacccttataatcacacctatacctaattacttcccaaaagctttatttccaaatactgtcatattggggattaagaattcatcatataaattttgtgcagatgcaaacattcagttcatagcagatgtctgtgatcctcctttccccaagcctttcactggggtatacaaaaatactccatggactcagtatatctttctatgtttaccaatgctctgtcatgtgacattggctcagaggtttagtaaatattttgcctgtggtgaaatagctccaaatggcagaattatgatgtaaaattcatctacatcattaccactcagatgctttctttaatatatgcggttgcctttcataagtaagcaaacaagcaattgaaagggggccctgctatgtttatgtcagtgggatcttccctgtctggctcacaaaggctacattttatacacctgtggattgtccagaacagcagaataacaaacatggcatttactaggatagataccaatttaattttttatttattaatatttttttcaattgaaaagttatatacatttattgggtacaatgtgttgattttgtatgtgtctatatatacacacctatgtgtatacacgatgtgaaatgattacatcaagatgatgaacatatctaccacctcacttatccctttttttgtgatttgaaatttactctctgagctattttgaaatatagaatacattattattcagcttagtcactctgctgtgcagtagatgcatgactatctgctagatgacataaatgcattttaatttgatcttcaacagcagaacaaagagattactcatcatctctcttttttctagatgaagaaagcaaagtttagagttaaatgactagactgaggccacacagctggaaagggacaaggaccgttttgtagttcagatccactggcttccaaagcccaggttttttcttccacactgagaaatctctcaaagtggatgagcttattgcacctcaaaccagggaaaatcttttaatttgattcttcataagaacaagaaaaagttagctgagaagattgaacaagcacattaatgatgaggactttaacatataaaattaagtatttgtattagaataacacacaaggataaaagcaggtatggggataaataccagttttcctccctgggtatcagtagccccttcatcccagggagacaaggacaatgccacttccttgattgctctccaggttcttcccttctatcctttttcctcaacttcttgggatgttcctaaacccaaaggctcaaatctgtttagattataagctccctagagataggggctgtctctctcctttttgcatttctggagcctaggacagtgctggtccaacgaatgggtgcatcacttggctctgtttcctgaccacctataacacctgctggtttctagaatcaactctgatgtgcctctttctggagatcatgcatgcctgctttctgcggctcagatcttaaagatctgactttcagcattaacaacccatagttcagcaaaatagatttctagaactgctgctattttaatatctgcctttgaagaaaacccaaaatggtgttgtgcctgagtttcagaacccactgctctatgagtgttttttgcggctcagctccgtgacaatgggaagaacgtggctgtagaactccaaatctgagggtttctgcaacattttcctactgggctaatgccccattttctttggtagttttgtgtccctacatagaaatatcccactggcccctatgctaatcttaaccaggctgactgaactgacaccaagcgctggatttattttagtggcactaacatgtaagctcatgttaactgatgttggaaaaccactatgttacttgctcataacctatttactcttagtttatacaaagtcctaaaagccttgatatgtctgttttctaactctcagcatactgaatgcatcacactgtgtgttgacaaagatactgataacaaagggaagtaacatataacagctggatagtaaaggaggaagcagaaaagctaataaagacaagctcagagacttgaacatctggcagtctgggaccattccatgcatcttgagatgccacatagcttctgagacatccctctggtaactgagcagcatggctcaataatcgatgtccaaaatgatgactcaaaatccaaaaatcattccctgttcagtaggctctaaattgcagtgtgtctaacatgacaaaaagtatgaactatgttttagaactgtgtccggttaaaatgctaatagtattccaaggaaaataaaacagaaagacacacaaagggagacagaatgagacagaattgtgtgtttgcactttttgctgccaataaattgtatttaaacatttgcctattttaacagaagcacatccattaatcccattgaaggacatgaacaaaccatttaatccatatgacatggaaacctttggtggcataaggtagcaagtggggtacagtggcaagttagggagcagttaaaatgattccttgttaccacagggctgacatatttggtgctctaatgacttagctgtgtccttgttgtcccttgatagttccacaggactcctgagttgagactgtacccaaggaccctggacttacctgttcctctcataattaaaagatcctacttttcaaccttattttatgttttaaaatgttgatcaatttcaagatgagataaattgagaaatgaaggactagacaaaggaggtcaaattaacccatttatgcctgaggttgcaattttttaaatttttgcaatcagaccttggcaatgaccttgagcagcaggaaataaataattgccacatgcttagcgttccaataatgaaacgctaggcttaaatgggtttacgcacagaaactcagttaatgtcaactccttcattcctgtaaacatctcaaaaaatgcttaagacaatcaaaggttcaagttcttctgaaatgatacgccctaaagccttatttaacgtaagtgggtaaacgaaaaaaatgttagatattacaagaacaaaatgttcctagagaatagagccctctctggaatcagtaataatgcaggctgctgctatctgtgtgcatttctcaacctttctggaaaatggcacacaaaatccttcccacttgtattttgccaccactcatggcctatcaattctaatgaaaatactccacgctaagaaggtgacaggaattacatacatcatctttttttttttttgactttcctttctgtctatcaaactgtactttaaaggaactgattattaaagcattatgtaagtatgcaaaatatattgaaagagaaataatgtttccattatacacaatgtgtatcataagaaaggctggtgtgtgatgacacatgacaagtggtaaaaggtatttttagttgctttcattttggggaataataaagcaaaattatctggaatatacagcattaggagatttttcagcttctctaatagctagcattatttatggcatattttaaactaaatgtctaactggaattgtttggaaagttaatatagatattactttaaagatattttatactacctttaataattaatttgcgctcctttgaaaagcttatacaaggtcagtatttgctctgttattttatgatctttttcacatctgtgttctttggaattactcctaactcatgataattcataaatcatttttaggctgggcatggtggctcatgcctgtaatcccactttgggagggattacactccctggcactttgggaggccaagacgggtggatcacttgagctcatgagttcaagaccagcctgggcaacatggtgagatctcgtctctataaaaaaatacaaaaattagccaggtgtgatggcccactcccatagttccagctattcgggaggctgaggtggaaggattgcttgagctcaggaggtgatggctgcagtgagctgagatgataccactgcaccacagcctggataatacagccagaccttatctcaaaaaaaaaaaccataaaccatttttaatttatctgagaaactgacctatgcatgatgtgtagttactgcagaaaatgaccaagaaattatctttacaatttaaatatgtaaagctcaaaagcaatgaagctaagactcctggaaattctgactgaaataaactaaaggatgtttcaactgaacctgagaaaaataagcaataaaagttgattatttggcattttagtcttttttcaaagataaaaatcacattctttctagtggaatcacatcacatgcagaaatagcccatagaagagtctaacggtggcaggaggtgtactgagttacccaccgggaaggtgcaatgaggcactctcagctctactttttttttttttttaaagtaaaagaccagaaattttattatcttagggaaattatagaatccacttacgatgatcatttacattttacctttatgctccaacttgttttatcagccaattaaaattgaacagcgaaaaatatctttaaaagttacattttcaaagggaaaaaaacatttttgccctcttaaactaacactgatatttgatctcaatgttggccctttctgttcaactgaagctttaccggtaaaaattagaggttacagataggacattgttttgtgctgacataatggggaatgactgatcatgaattttttttcttgaggtgaaaattgttattgttagtgatttgaacagtccctttaaaaattagtgattaagaaataacagagtattctaaaacactgaatctgggaagaattgatatgtgtcatagaatatagtgataaatattggttattaatgtgaggaaataagacagcctttttaggggaagtttgtagaatattttattgctttgtagtctaatatttttgtgcttttattgaaacattttaaactgaggcaaaagtttatactttcataagctagagatgtgcaacaaaaagttaatattcccttaatttgtcacattctaagggaaatgtaatgatccaagaaaatcttctgtgttcggtatataccaattatatgacaacttcgttgctgtaagataaatgcatgatctaaaaaaaagtttatgaggttagatttgctaagtatatatttattgtatagcataaggactaaaaacccttaatgtaggctagtcaaaaaattaaaacagcttggacccttaattgacacacacacacacacacacacacacacacacacacgcagacgcacgcacccatttttagccttttcattaagtttcttcaggtgggggaaaaaaaaaactgtttaaggactttgtctgtgtggttgggttgctttcattgtcttttaaccaagccactgttttcctctatttcaggatctagatttctcatcacatccacgggagccttgtatattaaagatgtacagaatgaagatggattgtataactaccgctgcatcacgcggcatcgatacaccggagagacgaggcagagcaacagcgccagactttttgtatcaggtaaaaacttatcaagactctgtctgctatgtctgctatttctttgttagtgtcctgagacgactcaatcaaaattgtggagtgttgccactaaaatggagccttcaattccttttccaaaatattttaggaattttaaaactcttttaaatgaatatgagtacaatttcatagaaatacagatttcacatttgtcaaaccagtaattgacacattcacataatgatgcgttagcatttcagggagcacattaggagtgaaagatccatctccatcccaaatatccatctcaaatgcagtcaaattgcatttgatttgattataaaaccaaatacaaaatacccaacctttgcctttgtagctgaagaatataaaattgcccccctgtggtaaatatcctataaggttgtaatagtgagatggaagtgaccaaaggttgcttgctatcaatatttgagaagtaccttatttgtaataatgctttatgggaagaagtgaagggaacttgttgaacattggaataatttaaaacatcactgcctgagcacccactttttgtccttgataatgtactgttgggatttttctcttcatcacttacatcttcaaaatagccaatagtctttcaaggtccagcacaaatacaagtcagaattaaattagttttcctttgaacttgcaagtatttttgtttctttatctgttcttttacaagtcaattgctattttctcccttgcttttatagttatcatgtcttttgggggaaaaatgaattagaaaatgaataataactatcatcttagtccatgatagctttaaggagagcacaatattctgcttattcagaaaatcctagaaaacgtcctctttgtgttaaagagaaattttctaatggcatgttcagaaaagaaaggggaaggattcgaggtaggagggggatcctgatataaaattaatttgggattcgcaaaattagtaaataagcatttctccctccaaatgatgacataagtggtgatgatctaagagcccgtctttctgtttcaggtgaccttttttatcttcatgctgaatcatcaagtgttgatttttaaatgtatctctcagggttggaaaggcaagtttactttccttaatcccacgatgtttgttcattttttgttttggagtgattcactaatgtttcaaaaatggacagaagtagtcacaagcattttgtcaccatgggagtcctaggattgcctagtgagcattggaaaagtgagagcaacaatgtataatccagccagggaatatcatacactaagccacctgccgaaaagtagccaaggaataagactgagcattcaggactaacagtatagatgaagacagggaggtgatagatgccaggagaagggaggggtccacagagtcacatgccacaaaaaggctcatatgagagtctaccatatgtggaaaataactcaatattttttgtcattgaaattttaataaagcagttgaggaagaaatttgttaatgctaaaagatgagactgtagacactgaatacagaatgcatttctaacatgtcaagctttgaaggaaaagagaaattaatttcattttaaattagatttaaatatactgaaaaatgtacatctggagtttgggtcatggtggaaacatgttggtgtttgaccccaaactcctcctgaaaccaacacagataaaataggatgacaaagaaaaaagtacatggatggcaccttcaacacaactggattactggcaacaacaggaccagcagcagaggtggaaggcagtagaaggggtcagcctgttgggtttatggtagtgtcagaaaactgcaaataaccaacgggtccccatctccaaaagcagaggagaattctttgtgtcttagagtcctcacaacactgggatagaactgcatgaggtctaggttggagatgagtcacaaggccattagagtggctggtaatgtttgcacaggccagtgatggtctatgtccttgaagatagtggaagtactcagcaagtactcctttcagaagaacagagactcactctcaggggaacggctcaatttagaaatcaaattgagccagagtagaatacaaagagtaacagagaaggctcgggaaccaggggaggccctagagaattccatcctatgaaatactgcaaaagaaaatacaacacgcacagccttagaatgtaaaaaacagtgttctaggaaacacatggccagaagtggaagcccatacagttcaatcccatatagctctgagagatgggctaaatgtcgagtccttgaaggtaatatcaagggagaagactggaaaaatatactcatttcatcctctcctgcaggaaccttctcctaattaactaagaatctctatcttattgtaaaatgaaacaaaaaggaaaaagatttaacccaacacaactttatcacaagaaaaagaatgaaaatttttaaaaaagttttgattataagtaactacaaaaaatactgacaaatcatatgaaaactatatttttttgtttgaaatgattaaagctttgaaagagcagtataaatcagaaataaaatgatgaaacaacacaaatctgtgaaacaaaaagtggcatattttggaaaaagttagaaaaatgaagagttctaaaattaaaatgaaatgacagggaacacatcagaggataaacacaacagaaagcataatatgggaaatcaaaaatattaaggaataagacaaatagagttaaaaatgtatagatgtctgacaaagatgatgaaacacatgtataactaaattctcttaaaaagaaagccaagcaattgatgagaataagtattaataataaaacactaattcaaaaaaagtctcctgtcattaaaaagaatgcataatgactacatattaaaatggcacaaccctacctggaaaaatggacccagaatggtcaacatgcaacatagtctaataaaatttttgagctgtaaagataaagaaaaatatcatttagacagccagaaaataagttcaagttacttctaagggagaatataaacagactaatgaaatagaaaatagaccaaaagaacagtaaatgtaataaacaagttttttctttaaaaaaaaagtcagtaaaatagacaaactgacctaatattttttaaaatggtcttgatttctgtgctagggctagttatttggacaagtcattctttctctgaggataactagaaagacttgttaaatgtgtaaaaaacatctgctcatggctgttaggagctagagtgaaaacttacaggaccaaattccagaggaaaacagccacaagaagtgagtttggtattgaggactgccttttcagtagggacagttttagaggagattgctgaaactccgagaagatgagcaactcttctgaaaggttagtagtgtctagaaggtaaaaattggagtctagtctctatatatgtattagggttctttagggggacagaattaataggatagatgtatatataaagtagagtttattaaggagtaatgactcacgtgatcacaaggtaaagtcccacaataggccgtctgcaagctgaggagaaagaaagtcagtctaattcccaaaaccttcaaagtagggaagccaacagtgcacccttcagtctgtggtcgaaggtccaagcgtctaaaagttgaagaacttggagtctgatgctcaagggcaggaagcatccagcacgggagaaagatgtaggctggaggactaagccagtctagtctttccatgttcctctgcctgcttttatcctagccatactggcagttgattaatggtgcccacccagattgagggtgggtctgcctctcccagttcactgactcaaatgttaatctcctttggtgacaccctcacagacacacccaggaacaatactttgcatccttcaatccaattaagttgacactcaatattaatcatcacattaaatatatttgtttatatattatatattatagatactcatttttatttatagtagcatatatagtgggataagtgaaaagtgattatgtttatgttatttttatttttattttcagtataagagaaaaataaaagtatgaaattcttttataattcttgaaaatttatagaaattcttgaaatataacaaaaatgtaaggcatttatacaactgaaataattatttctaaatactttacatatgtactttttatcctaagctctaagagaacagatgtgccttagtgtgtatatatatgtatgtgtgtatatatatatatatatatgtatatatactagtgtgtgtatatatatatatgtatatatactactgtgtgtgtatatatatatatatatacacttttttttaattgtactttaagttttagggtacacgtgcataacgtacaggtatgttacatatgtatatatgtgccatgttggtgtgctgcacccattaactcgtcatttaacattaggtatatctcccagtgctatccctcccccctccccccatcccacaacaggccccggtgtgtgatgttccccttcctgtgtccatgtgttctcattgttcaattcccacctatgagtgagaacatgcggtgtttggttttttgtccttgcgacagtttgctgagaatgatggtttccagcttcatctatgtccctacaaaggacatgaactcatcattttttatggctgcatagtattccatggtgtatatgtgccactttttcttaatccagtctatcattgttgggcatttgggttggttccaagtctttgctattgtgaataatgcctcaataaacatacgtgtgcatgtgtctttatagcagcatgatttatattactttgggtatatacccagtaatgggatggctgggtcaaatggtatttctagttctcgatccctgaggaatcgccacactgactttcacaatgtttgaactagtttacagtcccaccaacagtgtaaaagtgttcctatttctccacatcctctccagcacctgttgtttcctgactttttaatgatcaccattctaactggtgtaagatggtatctcattgtggttttgatttgcatttctctaatggccagtgatgatgagcattttttcatgtgtcttttggctgcataaatgtcttcttttgagaagtgtctgttcatatcctttgcccacttgttgatggtgttgtttgtttttcttgtaaatttgtttgagttcattgtagattctggatattagccctttgtcagatgagtagattgcaaaaattttctcctattctgtaggttgcctgttcactctgatggtagtttcttttgctgtgcagaagatctttagtttaattagatcccatttgtcaattttggcttttgttggcattgcttttggtgttttagacatgaagtcctttccctaaattttaaaaaatgcataaaatccttgaaatgtcaaattccaatagaaactattggtatttgtggtatgcgtggtggctcacacctgtaatctcagcactttgggagaccgaggcaggcagaccacttgaggtcaggagttcaagaccagcctggctaacatgatgaaaccccatctctactaaaaatacaaaaattacccaggtatagtggtgggtgcctgtaatcccagctactcaggaggctgaggcaggagaattgcttgaactcaggaggcagaggttgcagtgagccaagatggcaccattgcactccagcctggtgacaagagtgaacttccatctcaaaaaaaaaaaaaaaaaagaacacaaaaaactattggtacacacttcaaaaaaaaagtatgaattttcagtctttccactgagaagtcccagaagtgatgagcaaacaatagcaacaagcccctctaacatctagattgtagattcttttaaatataattcactactaaaagggaccatggcttcttggaggagtggctgattgaaggtctgaggcaggaaatgtctgaggtgagtctgaaacatgaatggggtcttgtcaaaatgacataggaatcaacataaagcggctctcgtcagccaaaggggatgaattgagtatcagcagtgatgcttgcacatgattgataaccattaaatattttgaaaacctttgagttcattttaattttatacatacatgtgtgtgtatatatagatatatacacatatgtacatatatacttacatatgcacacctgcatatatatttcatataaagaaagaaagaagaatcttattggtctgcatagtagaaaccagggcactaactcttcattctgataacagatgattaaagacaacaaccactaaatgtattgtctttcctatagctgctgtattttaagataaccaaataaccttagttcagaagggaaagttcattctgcagaataattatatctactgaatgcgaacgaaatgacacaattagaaaattccattttcaaccttagcaaaatagctcagataaattttaacatctgacctcactgaacaattgagtgtcactaagaacgggaaaaccatacattttgtggaagcaatgtgaagtgcacagcacccctctcaaagagagagaggttgaacacttatctaaccaacccactgaaataaattccagttcataagaaaaatgcctatggcaataacggaacaagttaaatgatgacatggacaagcaaattcagcatggtaactacctggtttctttttttttattattattatactttaagttttagggtacatatgctgctataaagacacatgcacacgtatgtttattgcggcactattcacaatagcaaagacttggaaccaacccaaatgtccaacaatgatagactggattaagaaaacgtggcacatatacaccatggaatactatgcagccataaaaaatgatgagttcatgtcctttgtagggacatggatgaaattggaaatcatcattctcagtaaactatcgcaaggacaaaaaaccaaacaccgcatgttctcactcatagatgggaattgaacaatgagaacacatggacacaggagggggaacatcatacctggtttctttaaaaagccaagtcaaatacatgggagaaaggaggagggctagctctgcattaagaaacactcaagagatgtaacaactgcatgtgagcaagagaaggatcttgatttaattaattcaattgtttaaaagctagccacttttgagctgatgaggaaaaatgaattgggagtgtataatacttgatattatgtaatactgactgtggttatgtaacaaaaccgtatttttattagggaaacatgctagtcatgtaatgataaaatgacatagcttcccttttttgttttttgttgttgtttgtttgtttgtttgtttgtttttgagatggagtctcactctgttgccacactggagtgcagtggtacaatctcagctcacttcgatctctgcctcccgggttcaagtgattcccctgcctcagcctcctgagtagctgggactacaggcatgcaccaccacacccagctaattttttgtgttttagtagagacagggtttcaccatgttggccaggatgggctcgatctcctgaccttgtgatccccctgcctcggcctcccaaagtgctgggattacaggcgtgagccgctgcacccagcctatagtttcccttttgttgcatatactttaccaccaaaaacaaagtaaaactatcaagaaataaacatgacgaaaaatagaaaaggtttggtgccagagccattaatatgatgaatatatgggatgcgtcatattatttttgtctacttttctgtacgttttcaaatgtttggggtaaaaataatttttgtaatatatatatatatataaaagtttgaagactttgagacaaaaaaaaatttgaaggggatgaaaatgaaagacaatgccgttcggttattcagatttgatatatgaccaaatatccccacaagagcctgtctcaagcattgcttcaatcatgcacttaaaatataaaacatcagatgctgtgagggtgcagagaaaagggaacacttatacactactggtggtaaagtaacttagtcctgccattgtggaaagcagactggagatttctcaaagaacttaaaatagagctaccatttgacccagcaatcccattactgagtaatatatccaaaagaaaataaatcattcttccaaaaagacatatgcacttgtatgttcatcgctgggctattcacaatagcaaagacatgaaatcagcccaggtgtccatcaatggtagattggataaataaaatgtggtacatatacaccatggtatactggaaagccataaaaaagaatgaaatctcattctttgcagcaatgtggatggagctggaggccataattcttagtaaattaacataggaacagaaaaccaagtacctcatgttctcacttataagtaagagctaaatattgaccacacatggacacaaatacaggaacaatagacactgtggacactagactgtggaaggcagagagtttaggttaaaaagctacctatcaagggccaggcacagtggctcacacctgtaatcccagcactttgggaggcctagatgggcggatcacaaggtcaggagatagagaccatcctggctaacacggtgaaaccccgcctctagtaaaaatacaaaaaaaattagccgggcgtggtggtaggcgcctgtagtcccagctactcgggaggctaaggcaggagaatggtgtgaaccccgggaggcagagcttgcagtgagctaagatcacgccactgcactctagcgtgggcaactgagcgagactctgtctcaaaaaaaaaaaaaaaaaaaaaaaaaagactacctatgaagtaccatgctcactacctgaggaacaggatctctactccaaacctcagcatcacgtaatattcccatgtaacaaatctgcacatataccgcctatatctaaaataaaagttgaaataaaaaaataaatacctcattcaggtttcgtaaaacagttttgttgagaggtagtttactttaatataaactccatccggtttattcaattcaataattttagtaaatgcatggagtcgtgccacaattacgccaatttaattttagaatattttcaccacccaaaagattcctcctacccgtttgaagccaatttcaatgtccatccccagtcccagacaaccactaatctatggtctgtctctgtagagttgcattttctggatatttcacataaattgatatatggattttgtgtctgccttctttcatgcagcacccatgttgttacatgtattagtcattcattctctcttgttgctggagagcatttgctcatctgtaaatactgcatttggttatcaattcactaaattatgaatatttgggttgtttccactttttgattatgaataatcctgctatggacatttgtacctaagtctttgagtgaacatgttttcattcatttagggtagatacctagaacttggggccttatggcaaattgaagtttaaacactttaagaaaatgccaacttgttttggctgcttttatttggcaagtataccacaatacacctggggaaaaaataaactctagccaatgtgatgtaagaggagaaaaatgtgtgggtttgtaggaaattctgcttaaaagtgacttcactgagggggcattcttaagcatttttgctgtgatgtggatgtgaaggctggcactccagcaagccatttttacgtgagatgtatatgtgtgcatatgtaagtatatattaccttccaccaacgatgtatgaagattccaggtccccatatcttcaccagcattgtttgtgattttattgcagtcatcctaatgggtgtgaagtcatgtcttactgtgattttaattcatattaccctaatgcctagtaatattgagcatctttttgtgtactgattaggtatttgtgtatcttctttggtgatgtaaaatagtcaactattttgcccattttgattgggttgtttcttttcattatagagatataagcatttttaatattttttggatttgagttctttattagaaatatgattttcaattttttttcactttctaaatggtgcctttgaaaatgctacagttcttaatttttttttttttttttcgagatggagtcttgctttgttgcccaggctggaatgcagtggcatgatcttggctcactgcaacctccgcttcccgggttcaagctattatcctgcctctgcctgtagctgggattacaggctcatgccaccacacctggctaatttttgtatttttagtagagacggggttccaccatgttggccaggctcgtcttgaactcttcacctcatgtgatctgcctgcctcggcctcccagagtgctgggattacaggcgtgagtcaccgcactgggccagttcttaattttgaagaagtttattatgttgattttttctgtttttgcttgttttcttagtgttatgcctaagaactcttcaaggtcatgaagatattttccctatgttttcttctaaaagtttttatagttttagctgttatatttaggccataatccattttgagttaatttttgtaggtagtgtgaggcaaggttctaaattattttccatgtggatatccagttgtctcagccattttttaaaaatgtcattagaattacatagcactatcttaagcatatttgagaaatttctgccaagtttcagttagaataaaactttttaagtgcagtcattgagagttgattttttatgaatagcattagaagttggtgcatttcattttcagagattgtgggattattctgcaaagaaagtcagaggtgcacactgtggtgtttattgtcagccacccctgccaaaggggtgacatctttgtgccaccttctccaactctacttctacttcctactctaagtaaaatgacagattttgcagctattttttcatagtactttctaatatcttcaatattccactctagtgtaactaaaatctgtattactgaagaacgagagctatcattatattctcacattttttgtttttgtttttttttattatactttaagttttagggtacatgtgcacaacgtgcaggttcgttacatatatatacatgtgccatgttgttgtgctgcacccattaactcgttatttaacattaggtatatctcctaatgctatctctcccccctccccgcaccccacaacaggccctggtgtgtgatgttccccttcctgtgtccaattctcacatttcttaattaaatgaagacagagttcagaataatagagaagcttaccccaagtaatacatattatcttggatgtgatttctacttactaaacaatattgcaatggtgtttatatggtctgcaagttagtgtactaggaattaaaaaatcccatgtggttaaggatgtccaggaccatttctggagctggctttaggcacaactttgtgtcttctagttcactgaacccattgggtgtgcaggtgatgatacttccagtaacatggatgcagacagctaaccatttttctggattcttggttcatgctagaagatgccagagatcagtgagacatcattggttaggcctgtctccacttaattattcagtctatgggaacataacttgatcttcaaaccaatacttttcaaagtccgtttgtaatttcctttagaagcaggtaaatgaagcaatgaagtttttgctggcacaggctctgtacctgggtattgtgaaacttttatatctctcttgccttctggagccctatagtcatgcatatgaatgactgtaattctggaatatagaattcttcagttaatgaagaattagaggagtcctggaagctcatcaagtattctttaaaagagtatttaggttccctcattatatcactgtcataagacaccagtgaagtaaaaagagcagcaagttcataatgaagttttatctctgatgatcacaaaagaaatagaaagccaagacatttcagctaaatgtttttgttctattttcaacagtgcctgctgactgccctcagtggctgactacggaatcacagcctcttaaagaagtcttcctactaataaatgattttttgatgttattgtttattaaaacagaaatttactctcttgtatataagtccagaagctggtttgccagcttcagtttcacaagggaccaggcttttatctttctgatccattatcctcacgtgcagttccattctcaatatgatttcaaagtccaaagtgattgctgcagctcctacctttatatccaccttccaggtgatgtaaagaagcaaaggaaaaatgcataaaaacacccctcccagctaagtcgcctttaagcagaatttcctacaaatccacacattttcgcctgttacatctccttggctagagtttatttttcctccaggttaattgaggtattgaaaaatgaaaattgtatatatttaaggtatacaatgtgatgtacaatgtgcatatatatatatatatatatcactatcaagcaaaataacatatctattgcctcacatagttaacatttgtgtgtgtatgtatgtatgtgtgtgtatgtgatgacaatgtttaagatcaactgtctttgcaaatttcaagtatgtaagatagtgttattaactgtagtcactgtgctgcatagtaaacctctagaatctattcatctggcataactgaagctttgtacccttttacctaccatatgatctagcaatcccactctgggtatatatccaaaggaaatgaaattacatatctgcactcccatgtttattgcagaatcattcgcaacagccagaatatgaaaaaaacttaagtgttgatatacatatacacacatgcataggaatatcattcctatatacacaaaggaatattattcagccttaaaaaaggaagcaaatcttcccatttgcaatgacatggatgaacctgaagggcattgtgcttagtgaagtaagccacgcacagaaagacaaacactgtcttttctcacatacatgtgaaatctaaaaaagtcaaactcagagaagcagggaatagagatgttcgtcaaaattacaaagttccagatggctctcatttgataggacagtgaatatccattccttggccatcagatttattgcaggtagatcaaaagagtcatggcatttttctcactgaggcaaagacaagaaaatttcaggtagcaggagtctataacgtttctgtaatatccatgtggaatgcaagggtattgtttcatgcaagttctaaacaggttgaattagaagagagagcagggtgagaacactgagttttacgtttagcatccaatcaggtgctgtattttatattcttcatagtcatgcaaagattatgaccttgggaacatcactccattcaaacaaacttgaaggacattgagctgcgtggtttccacagacccagttcttgagaatattttatcaatttcctcacctggttcaagatgatgtcacagaacaggaaaattatacaaggccctgtcataagtgatcatttgcaagctgctgctttttaatccattgtcttgctacgccacatgctgtcggtagtgctcattcaccttatctcaaataccatcttctcagagagtctgtccctgaggaccatatcttgagtcctcctggctgcctccacacccatagcacgtggacttcactctctgttatgccctctttttctttctttaactacacttattacaaactaaattatctttatttgcttgctaatgtgttgcttgctccccaacaccacccgcccaacagaacatgagctccaggaagacacctgtctcatccaccactctccctttagtccctaactctgtgctggtctacactgagggatcaaaacatatttgtgaaatgaataaataaaatgttttaaaattcaaaagctatgtgtaaaactcttttgtgcaataaattttactaaagttaaacagctatttctgcttatgttgctctttttttttttttttttttttttttgagacagagtttctctctttcacccaggccggactgcagtggcgctatctcggctcactgcaagctctgcctcccaggttcatgccattctcctgcctcagcctcccgagtagctgggactacaggcgcccgccaccacacccagctaattttttgtatttttagtagagacggggtttcaccgtgttagccgggatggtctcgatctcctaacctcgtgatctgcctgccttggcctcccaaagtgctgggattacaggcctgagccaccatgcccggcctagtgttgctctttttttctgtttaaatttatttaggctgggtgtggtggtgcatgcctgtaatcccagcatgttgggaggcccaggcaggaggatcacttgagcccaggagtttgagactgtggtgagcaatcattgcaccactgcactccagcctgagctacagagtgagccactaacttaaaaaatatttattttattaattttatgatattttattgatgcataatagatatatagtttggggtacatgtgataatttaatgtattcatataatttgttaaaatcaaatcagtgtacttgggatatccatcacattatatgtttggcttttctttaagctataattatttcaattcttctgttttagctattttgaaatatacaatacataattgcaaaccatagtcattccactgatctgtctaccactaggtcttatttcttatctcaaattgcatatttgtacccattaaggatcttttaaagagaattctgacattcccagttatgaaaagacaatctgatttttggcctgagctgacagctcttgttgaagcctgctcattctggatcttttattcatttactgaggaatgaccaacagaagctctgaccagtgttcaaccttttgtaaattctgagcagaaaataaattgtatgaatagggcacttctttttctgttcacttataaaatcttaaagatctgtatcaatagttggtatgatgcaccgtatttaagttatacatgaagtcctacaattctaaatgaccacttcaactcctcattcctgcctctaagagtttttatttcttctacagacccagcgaactcagccccatccatactggatgggtttgaccatcgcaaagccatggctgggcagcgtgtggagctgccttgcaaagcgctcgggcaccctgagccagattaccgctggctgaaggacaacatgcccctggaactttcagggaggttccagaagaccgtgacggggctgctcattgagaacattcgcccctcggactcaggcagctatgtttgtgaagtgtccaacagatacggaactgctaaggtgataggccgcctgtacgtgaaacgtaagttggacggtaacttgcaaaggtggtgttggcttccatcgatggagctcctgttataagcaaatctccatgttttctctgtagctttccattaactcccaaaacagtccagctgagatcaacagaaacctcattttacagatgtgaaaattaatgctcagatgaattccccaaggttacacaactggagagtcttggctgtcggatttgatttgaaatctttctgatccccaaacctctgtgatttccattaggccacagactattacatttccaagatatgatttcaagataacacttcctagctgatgaattcacaacaaccagtctctctaaaaatgaacagagagagagggtaggattgttctttcagcacaagtgatggtagccaatcaaagcagttgtcctttgtctgtttccagaccatttctccattaaatttctaaatgaggctattatcacccaaagtacggggctcaaacatacccaaatattagacttgtgcctagtattatagatcatctactccaaatataatggatttatttgatcttctattgattgccttggctgccttgaggaatgtgttcagaaggatactgaaggcagatttggaggaaggagggatgtgatcgcagggtcacaatctaatctactcaaccaccctcaattttgctcttgcagaaaccaaattaaagtgaattacccaagatcacatggccagaaaagggaggcagagcattggtcagagaggaggtcttagttgccaatataatgctccttttttgaaaatatatttttatttgatgaactaaattgaacaaatttaaccacaagaatctcacagtgacaatagaagtgttttcttacttcctcctccccacccagccctaaccctgtttatggaactttctcttcagtgtcaacctgagtgtagactgccttagcgcaacaccagcctaagagaatatatttatattaaatatccaaatgactctctatctggaacaggctgtccagcctgaatcctgcaaatatttgaatatgtttagtctgggattagaaagaaatggatgataaaatccacagtcacacttctatagctgaagaatcatgtggataaaataatgcagcattggacagccagtaagaattattcccacgggctcaaagtctcttctgtgtttaaagacctctcctagctccctgttctccattgaataaagtttatatcttaggatagtactgaaggcatctcaagcaaatctgtctggttgtatttcccattgttttgcattaaaacccacttatgactagtgttccattattggaacactaagcatgtgggagttatttacatcctactgtgcaaggtcatcaccaaggtctgattgcaaaaattcaaaaaaaattgcaacctcaggcataaatgggttaataaaaacctattcctgctaaatctaacttcttcctaatccctgcacaaacctattcctttcctgattgcaagtcacattacttatgttgcttcctccacatggaagattatttcccaatacttggttatctaacacttcccaactctcttagcctccatccacaaagatgtgttgttccccattctcctgtctccttctcaactcagagtatgttactgctttctctctaaaggcgtttatcactacctatattttaaaagcctttattcttaatgtgcttatttttatcattgttcccttcttccacatctaggtgattctccaatgcttctggaatattctctgcctcccttctgactgcttcttctaactgcagaagaaaacagcttcttcgttcctatctctcttctctattggaaggcattctcttgggctccaaattcagaactgtcttcttgtcaagctcttcccttttccttaggctctgtttcatttgtagagcttcgaattccttgcccctgaaaataagctctgaatctgtacttacagccttggcgtccttcctgaatgtcagacaagtgtgtcaaccagctttctttcagaaatttagttggcacttcaaaacaacagggtcggataccaaactgaactctccaccacctcttccttccaaatggctcttgttattattatcaacatcttcctccttctcatccctcagatgcaaacatgaaatgttgggtgccctttaagcctttcctttctacatcctgccaagtcctgccatgtcctgccaagtcatacaaactgaatctcacagttactcagctctgttctcaacctctgtcctgtcctagattggatcttaattgtacctacactagacatgtgtaatgtcttcaatgacgggttttcctcaccctaatttgtcaaaagacctatgacctagtgattccattaaaagtatgtttgtgctgggtgtgatggcttgtgtctgtagtcccagctacccaggaggctgaggcagaaagggagaggagtttcaggctacagaaactcctctgtatgattgtgccactgcactccagcctaggtgacagagcaaggccccaattctaaaaaaaaaaaaaaaaaaaaaaaaaaaagtatgacttatttgctaaacacttttgaatgccttctttagttatctttgtttaattccaaaatctcagggactctctgttgcatccaaaatgaatcagaaattctcagacatgcccctgctccctgccttaattcatgtggttcccaatctctgtgattccctctttccattctgactgatctcagttctatgcacccttgatatctgtggatttcctgctcttcccatccaccctcctccacatgtgctatgtctctaatggcccctccatcactctggttggttattacagccatttattgcctttgtcttatcaacctagaagactgagctccttgaaaacaaagtgtggtgagatgaaaagttaggaacaactggggtaaaaaaaagcttttttttcacccactttttgatggggttgtttgtttttttccttgtaaatttgtttaagttccttgtagactctggatattagaccttagtcagatggatagattgcaaaaattttctcccattctgtaggttgcctgttcattctgatagtttcttttgctgagtaagtagaagcttattagtttaattagatcccatttgtcaattttggcttttgttgcaattgcttttggtgttttagtcatgaagtctttgtccatgcatatgtcctgaatggtattgactaggttttcttctagcgtttctatggttttaggttttacatttaagtctttaatccatcttgagttaattttcgtataaggtgtaaacaaacctgtaggttcagcgcatgtatcccagaacttaaagtgaaataaataataataataataataggagaagattaccagaatggattaaaaagcaaatcttagccatctgccatctacaagagatgtttgttaatttaaaagatatatttatatgtcttctggcctccatttgcttctgctaaacaatcagaggtcattcagatctttgtttctctgtatgtcatttgccatttttgctgtctgctttaaagaatttctctttatttttcgttttccataatttgtaatatgactagacaggattttcatcagattttctctgctcagcactttctgacctttaaaaatctgtaactgtaggtctttcaccaaaaattttgttttgttttgttttgatttgccatttacctgttgattggatttggctgagttatttaagcgctctcaataactattttctgttttgtaaaatagagataacacaaaaattacaggattaggagaagactgacttaaatgatgtatgaaagatagtcgataattttatagcacaagctagctgcaccacaaatattattccatttttcttgcctgtgagtttaacctcatccttggcatatgacagatgctcagtaaatgttttctacattggattaaggttgttgaattgaaaacatagcaaggcgaggatgagagtttcttccctgtctaaatcactcagccccattttaaagaaaaactctgtttcgtggtcacaaattctaataccaacctgtttttgttttttttttcctcacaattgtgtgttattggccctgggtaaaccacatatgtcatacatgtgtgtgagaatggcccagggcaaacccaccagtgccaccttgggacaaggcaaattaggatttatatgatcaatacttaggtcactattggtagccagcatgttgcatttctttttttttttttttttttgagatggagtctcactctgtcccccaagctagagtgcagtggcgccatctcagctcactgcaagctcctcttcccaggttcacaccattctcctccctcagcctcccaagtacatgggactacaggagcccgccaccacgcccggctaattgtatttttagtagagatggggtttcactgtgttagccaggatggtctccatctcctgacctcgtgatcctcccactttggcctcacaaagtgctgggattacaggtgtgagccaccatgcctggcctgtatctcttattgtcagtggatttatatcaacatcctcacagagactcctgagaaggcagtttgaccaacattattgcatttgttgcaaagagaaataaagccagaaataaaaaatagcgaagaggatgttcccaaacaaaatgctcctctgtgaaataatgtggctgatacgaactgcatgcagtatgatagcaaaaatgtggctgataggaactgtgtggagtatgattgcaataatgtggttgataggagctgtgtggagtttgattgcaataatgtggctgataagaactgttaggagtatgattgcaataatgtggctgataggaactttatgggatatgactgcaataatgtggctgataggaactgtgtgggtatgattgcaataatgtggctgataggaaccgtatggggtatgattgcaataatgtggctgataggaactctctagggtatgattgcaataatgtggctaataggaactctctggggtatgattgcaataatgtggctgatacaaaatgtatggggtatgattgcaataatgtggctgataggaactctctggggtatgattgcaataatgtggctgataggaaccgtatggggtatgattgcaataatgtggctgataggaactgtgtggggtacgattgcaataatgtggctgataggaactgtgtggagtatgattgcaataatgtggctgatgggaactgtgtggagtatgattgcaataatgtggctgatgggaactgtgtggagtatgattgcaataatgtggctgatgggaactgtgtggagtatgattgcgtgatgcacttgctttgttgaaagtccagcctgttgtcgaaatgctatctagtgatgtttttatcttttttctctctctcttactaaaacctccagagccactgaaagccaccatcagtcccaggaaggttaaaagcagcgtgggtagccaagtttccttgtcctgcagcgtgacaggaactgaggaccaggaactctcctggtaccgcaatggtgaaatcctcaaccctggaaaaaatgtgaggatcacagggatcaaccacgaaaaccttataatggatcacatggtcaaaagtgacgggggcgcataccagtgctttgtgcgcaaggacaagctgtccgctcaagactatgtgcaggtggtccttgaaggtcagtgggcctcgtttcagggtatggctgaaaaagaacccaaacccagagcactcagaaaagaagaagacagggtgaagcagtgctgatcgctcagttctaggctctctgtctcaccagctagtactctaccctaatttttcaagctaaatcaggcaaatgggagagaaagttctgacgaaaataaaattgtttcatattagaagtaatgtaaagtaacataaatgttgcccacttgtgcattagaagttatctgccagggtttaaatcttagaagaaacttgacacttaacagttttgttgattattcatctctagaccagggtctttcaagaatgccttgcttggggaatttttttttttttttttttgagatggagtttcacacttgctgcccaggctggagtgcagtggcacagtctcagctcatcacaacctctgcctcccgggttcaagcaattctcctgcctcagcctcccgagtagctgggattacaggcatgcaccaccacacctggctaattttgtatttttagtagagatggggtttctccatgttggtcaggctggtctccaatttctgaccaggtgatctgcccgcctcggccccccaaagtgctgggattacaggcatcttgggaaacttttttatgtgttataggatctttggcagcatctctggcccctttccactagatgtatgctaggagcaccttcctccaagttgttacaaccaaaaatgtctccagacattgccaggtgtttgctgggtggggtgggggcaatagcctccagtggagaagtacaacttcagattgaaaatgcagagcaaaatgtcagtacagtggttggtagaatgaaaatatggcatctgtttggtgcagttgtccctagttccatccaaatgttctcagatttaagtaaatgaaatttgtgaggaattattttgtggtataataacaggttttggatatgtgatacgatttgcttttttttaactggttactgcatactaaatcttaaagcttatcagtcagccagagaaagaagctatcacaggcaacatatatttatcactacctgattgaactagcttctatctatgtatttgtgtgtcttgttggaaattatgtccatatataatttaaaattcatctgatatcaattgattaaaataataaaatgattttgatatagcctaaagggagtacaaagaaaacacactaatatgtgaaagtaagtttaaatatatcttgattataagaccatatttctgtcattcttttttaaccttagctaattttttaagaagtagcaggtttagcaatgagattcctattttgattcaatcgtttcattgcagacagtgagatttttaaagcagaggtgaaattagctgaaggcatggtattcatattaaatgcctgacactgtgttccgtataataattaagtgcagaaagtaatcaatttgtgcagaaccagtttgctaatgatgatgcactctagtccttacatagtcactatttttagattctttgtagaaaaaggagaaattacctgtctaggcccagttaccccggcaaccatttggtgcaactaagaaaacctaaagaccatattgatgatccataacgatgtcagaagagttcaggttatcagagtgacagcaagaaagatttcaaagacactcaggtctccctgggaaaataatgtctgctttcatctccaaaagagcctgtcacttgaactaaaaagggggccgaggcgcaccgccagcacactcgcagatttatttgtcgcatgtcagcttccattcaggacaagaagcttcacttttttttttctctcttctgagagatgacagtgctaatgtagcaaagaaagcagaaatggaattacaaatacatatctagtacctgctttaaaagagtgtctggctaatttcctctggaaaacaaaaacactcccattattctcactgaaatagcgatggattaaagtaaaattataaaaatttgcaatactgtgaactaggactgaggatagatacaatggagaatctgagaatatttcctatgaggctataaaatggaatttaataattataagttcaggataaaaccataatacctgaaaaatggaatgattttaaaaaagaataataaaagtttccagttctgggaatggtaaaatagcatatatcagcctaactcccaagatgataaaaacaagaaactttgggaaaagcaaaagtatatatagacatttgagagacaccaaaatcaagttggggagtgtcctcttccactgaggacacatctgaactccaaaaatggggagtgagaatacaaatgtgcaataaaaatgagacatacaaaaaacaggactctgcacccaaaggacaaaagacaaagcaaacgatagaaacaaatcatgagaggacccagatgttagaactggcaaacaaggactttacagatgctatttaaaatatgttcaataacttacaggaaaatatggactgaaagagtgaacgtatgggaaagaccaacagagaaattgaaactgtagaaaacagtctgtagaaatgaaaaaaaatcaccatatttgtttaatacaagattagagaaggaagaagaaagtatcagtgaacttgaagataaatcttagaaaattattcaatctgaagcatggagagaaagaagactgcaaagaaaatgattagagcttcagtgacaagtaggacatcatcagataacgtgacacacacatatgactagaggcccagaaaaataggagatacggaatgcagaagaaaaaagtattcagagataatgaccttagttttatcgactttggtataaaagtaaggttgcagatctaagaaactcagcaaactccaaaaataaacacaaagaaaattctatgtcagtacatcagagttaagctgctgaaaaccgaagataaagagaaaaacttaaaaatctgagggaggaaaaatattacataatgaggacatcaataacaaatggtagatgattcatcggatattttggaggacaggagacaatggagcaacatctttaaaatgttgaaaagaaaacgaaaaacaaagacacagccctgccaacgcagacttctgtagcaaaaaacccaacaacaacaggctttaaaaattaaggaaaaataaagatattttcagtaataaagaggtgaaagaatataatgtcagcagccctgcacattaataaatgataaatgaagtcatgccggatatagagaatggacatttatatctacaggatatagataacatggaacagaaatggaacataaaatggagacatatctataagaacaaataccatgagaaatggtaaatatattagtaaatatttagcaaaattgtgttttcttttttaatttctttaaacaattgatgattataacattataaaattaccacacttggccatgtgctgtcgctcacgcctgtaatcccagcattttaggaagccgagacaggcggctcactcgaggtcaggagtttgagaccagcctggccaacatggcaaaatcctgtctctgctaaaaatacaaaaactagccaggtgtggtggcatgtgcctgtaatcccagctacaggcagaggcaggagaacagcttgaacccaggaggtggaggttgcagtgagccgagatcctgctactgcactccagcctgggtgacagagtgagactccatctctaaaaataaaataaaataaaataaataaaatgaaataaaataataaaataaaaaataaaataaaatgaaataaaataataataaataaaataaagtaaaataaaataacactttattatagagtaaatataatagatgtaataacacaaagggcagaattatttgttgcagggttcttacatttcacataaagtactgcaatcttaacttttagcagagataatttaaaacatatacacacacattgatatacatatagattgtgtgtgtgtgtgtgtaaatcaattggagcttatcttataatgcaagattggaagaacattaaaaatctaatccgtgtaagtcactatgttaatagaataagggagcaaatccaattgattatctcaatatatacagaaaaaatcatttgatgaaacttgcatccattcagcataaagaatttctagcaaactgagactctagagagcttccttgacctaatgagtggcatcctgaacaatctacagctaaaatcatacttcctggttaaacactaaatgtttttcatttaagattgagaccaaatcaaggatgcccacatccaccacttccattcaacattatactagcagccctagttaggcttgagtagaaataaaatggatggagtttggaaaggaaaaatttcagctgtcttaattacaggcattgttgtttacaaagaatatgccaagaaaacaataaagcaatttctaaaagagagtttaaaaagtcattggatataagaatgatacacaaaatgcaattttatttctatatactcagaacaaacaattggaaactaatattttgaaactttcatttacaataacataaaacataagataggaatatattttaaacaaacgtgaaagatttcaacatacaaaaatacaaaactctgctaatataaaattgaaataacctaaaaaattgaaaagatataccatattcaaggattagaaaactaaatattcctaagttaacaattctctctaaaacgattaatgtgatttcaagcaaaactgaggcatggtggcttgtgcctgtaatcctagccctttgggaggctgaggcccttagcccaggagtttgaggccagcctgggaaacatggcaaaactttgtctctacaaaaaaaaaaaaaaaaaaaaaaggcgtggtgtgcacctgcagtcccagctacttgggagattgtgccacaccaaggacaacagagggagagagacactgtctcaaaaaaaaaaaaaaaatatatatatatatatatatatacacacacacacacacatatacacatactatatgtaccttttcaacaaattaacactgaaacaactcaataaatgtatggcaaaaaaatgagtattaatccctacatcacacttcatatccacacaaaattaagttgctatccgtatagaattgaatataaagtataaagcaacacagtctccaaaagaaaacagaataattcttcatgatttgcgaataggtgacgatttcttaggacacagaaagcattaaatgtcaacacaaatacattattaagaaaagaaaaaggcaaccacagactgggataaaatattttatacacacacaaatatatgtgtcatatatatgttgacagatattatatataatctctataggaatcttacaaatgtatcagatcattataagatatctgacatagatactatatatatatttccttgtatttcaattgttgtattccacaacaaatcaaaaacaaaaaggcaaacagtctaatataacaatggccaaagatttgagcagacacccactaaaggaaacacacggatggccaataggcacataaaacacgtgccttccacggtatttctgggaaaaatatacaacctgcgtttagtcatgaggaaatatgagacaaacccaatttcagcaactgactacaaaattactcttcaaaaatgtaaaagtcaagaaacacaaaagaggctgaagaatgttccagatgaaaagaggctgaaatgacatgaaacataaataatgggtgatacggactgctctggaaaaaaaacagtgacgagggatattagcggtcaatggacagaattttgctgtggacagtgagttagataatagtactgttccaaagttacatcttctaattatattctaagtgtactctgattatgatgatatatatgcacatataaagcgtgcatactctattattatgtttcttctaagctcaagcacaggcaaaaccagcacatcctaagaggaatcagagcagtgatctctgttggatgtggatttattgaaaggagcacttaaggaattttggtaatggaaatgttttatatcttgatcgtttttgtggttactctggtgtgtatatatttagcaaaactaagctgtacacttaagatctgtatatttcactgtatgtaaaatttacctacaaaaagagaagtataactgaagaacatttttctaaacacttgagttttcagagcttaatgtaaaaaccagtgaaaagaaatctacagctaaacacattttacaaaaaccatggaattataaaggacacgtgaaataactccagtactcctaagtattaatgactgatcatggacaatgaatagcaatcatgatgacatctaacttctctgtaaaattaaacacaggatgtgatgaggcaacgtctgcagtgcgttaaagacaaaagcatcaatttttcattttaatattttaaagttgtctttttcatctctgatagtaagagacaaaatgcttacaacccaaggacactgcaatatgctacttatgagcatagcctggaggaaacaaactccagggacttctccagccacctgaaacatgagctggaatgaagaagtgagattcaggaatttggaaaggagtagggggtggagggaagagctgcagcacagccccatcaccatgaagaccctacataactggcctccctgaccaagaactaggccccaaggttctgggggaatgagtggcactttcctcaaaggtgtctggtactattaaccattaactgtcacctttccctgatggaattgcaagctatcctaattttgcttgcctcctttctttttgtttataatactttccaattttcaacaaaaaagatattcaacaatggagattcattacttttataataaaatcaaaaactaaaaaaaatctactcattcttatctttcattatgggacaaccctttaattgaacacaaaaattcttttaaaaaacaaaagatgtcccctccagcaaggtctcttaccagactcagaaatcctgtggcatgtgattgcaattatgtcaaaatgacccacttatgcctagaaaaaatgtgtcacagtgttgatttgtatgcctgaggctggctgacctattggtaacttttcttctgattttcatacatttcctttaatatgcatgtatttctttttataaatggaaaaacatatataaaagaaacatgcatttgtaactattactatataagagaaaaaaccatatggatgatagaaaaataatggaatatgaaaatttgatctatgtaaacatactgaaaatttctatggagacttctctaagattaagatcctagtttgcctgcgatagttctgggtcatgcctgttctcttggcataattattagtcctttctgtttcagcctcaaaagtgtcccaggttggatgttaaattatatggccagcctacttaagatacttttagagagatttaaaacatgcttaagtaccctacttaagatatctttagaggtttttaatacacggcatttaatacaaactttatttagcttctacccattctcagagacttcatggaagtttgcatgcaattactatttgtaattaaagttattaaaagaggatttcttatgagaaaatgatgaagatgaggtcatcaatctctcagtagtttcctttattcctgtaaagaattccctagtgagaaaaccccaaataacttgaggaagtattaggttggtgcaaaagtaattgctgtttttgccattactttttgcaatcacttttgcaccaacctaacagataaagtgactgtttgtgggagtgagcgggtgtggattttccgtctgtttataactttgtgtgaggaaacaccagttttaaattaaggacttcttaggagctgtcattgtttaacctgaacatctgagttgtattaccattcctcttaagtcaatcaggaaatatagaaacagttgatgaaagcttgctaacactgtgcttacctgttttgaaaacagtgaactcttgttctgattaacgttttgctttatcaggaaaaccagacctttttggtaatgtttaacaactacgacatttaccccctagacatgaaagacatatacttggaagttgtttaattatttgtatgtgccactttcttccataatttgttttcctgcagatggaactcccaaaattatttctgcctttagtgaaaaggtggtgagtccagcagagccggtttcccttatgtgcaacgtgaagggaacacctttgcccacgatcacgtggaccctggacgatgacccgattctcaagggtggcagtcaccgcatcagccagatgatcacgtcggaggggaacgtggtcagctacctgaacatctccagctcccaggtccgggacgggggagtctaccgctgcactgccaacaactcggcgggagtcgtcctgtaccaggctcgaataaacgtaagaggtgcttgtcaaatcagctcctcaaaaaaacacacataactcattatagtggagaagaagatttctgcatgcaccgagctgggtcttggaatgccagagcggattaactgttgcttcccatttcctaccctctccttcctactcaggaatggcactgactgggttaatgttggaaatggcattttggtttctgtagtcagcttgttcttttttactctagatctgttcacctgatgtttcctttcctggtttatgctctgcatgccctttcccttctccttctcttcggttcttccacattcatggtaaaccttcatgtacatggtattaaacttacattcatgctgcaacgtgatgtaacctccattgtcgtcctagattttacagagagagttaaacaattgatcaattgctgccagtgtgttcaccaaaagtgcgtgattgtccagtatagactagttactttctattaattaaattgccttttatcttgtaatttttaattcaaaacattttcatagaagtagcagataaagtgtttcacagttatacatttgaatttaagaaaaggaaagaaaaacctttgttgtagaaaatgccacatgcaaaaatatttgtttaactgaaaaagatgtgcttacatgaatataatctacatttttaactcaaggaaaagtgtacccatttccctacatgagatgtacccttaaattattttcaagagtttctttgtgtctctccagggcctgcaagcattcgaccaatgaaaaacatcacagcaatagcaggacgggacacatacattcactgtcgtgtgattggctatccgtattactccattaaatggtacaagaactctaacctgcttcctttcaaccaccgccaagtggcatttgagaacaatggaactcttaaactttcagatgtgcaaaaggaagtggacgagggggagtacacgtgcaacgtgttggttcaaccacaactctccaccagccagagcgtccacgtgaccgtgaaaggtaagccctgttctcctggttcccacacaactcattccatagcccgactacttcccagaccaatgatttgaagtcgggtaatccaagatctgcttatttagagcaggataattgtacaggctgaagaatgacagggaacatgagatgtcctctttactactgactgaatcttcacaggaactttagttgatctgattttctctccaggtggaattttggcttggttttccagagggcatgtgttgttaacaatacaacagaaaaaaaaggagcacatcattagcttcattatctagtcatctctcagataatttttaaataaataaccttcttttcctaaaacctcctaaaagcaaggtctcttagaacttcactggaagggattttctgtattggatgaggatttcaaacaaacgtcttatcttctgtagatgagcaggtcaaagcaacaacatagaaattatatgtttaaaggatgccacagaacgttttcctcattaaattattctttgcatcatgacatggactgtcatggaatctacctgtcaggatgatctttagagatcctgcaatttgaattgactacaatctccttaccagaaaaaaacaataaggtgatcagactcatccaaggatacgcagacttttagtggcagagcctcagaaagactcatttcttctattctacaagtcagtttcctgagctgaatatgaaataaaattgttttaattatgtaaggaatctacctgaggtgggtcctaggaatagaactaatatgttataaaactatttccgaaacctgtgggtgttgcttctagccacattgagctgcctgtctgaggtgtccaagttctctctccaggaaccaataagtggcttttagttgcccttgttacaaagttgcataggtttcctgtggtcttccccaagcttcttttcccaccaaccctgtgagttttacttttgtgagaacgcatacagacacacacacatggaaataataatatgtgtatactattattacggggcatatatattgcattacattatatattatagaatatgtattgtgcattgtatattagatatgcctgcacataattataaatcggtttttaataaccatatgtcttgagaatttcctcaaatcactagatattcttggtaaaccaggctgcataaaggttcatttggtggttgtgtttatttatttaatcctcatttacagaacatctgcttcatgccaggcactactctagacactgaggaatacaacaatgaaaaaggtctgcaaggtcctttccttcattgactctcttctcagtcaggagagacaaacaataaacaaataaaacaagtgaataaaccagaaaacacctaatggtactccatactatgcagagaattaaaacatggcagtatcttaatggttcattgcaatagtcagatgccatatcaacacattttctgtactctgtcatcttaaaattcattggtctatcatacccttggaaggaatgttttacccacacatgattttgtaacataaaaagttgatcatttggaaatgattggttcactgtgttacacagatcttccaaatgttgatacaatttgttatacaatatcaaaatatcacaactactaacattaccatgatctcatcagaaagtcttcaagtaaactgtcaagttcatgctgatggatgcaagttttctaaaattctattctttcttgaaagattcaattttattatttataataaacaccatcaattgtaattgtaggagtgatgggctcatttatctgtaagaaattgtttgacaaatagaaaagaccgcataaccatcgtttttaggtagccattcttttaagaaagaaatggaattccatgaagaaaagcagctggtcgaatttgcaactcaagcaagcacagacatactctgcttgaaaatagccgtgctgctcaggaggtggaggaaacactgtgccttcttcccattttattacacaggacatagaacattaaaaataacgtgagctttagggtaaagatgtaataaaactgttatgtttcctgcttcgtcaagtgtctgtaagtgaatctggcatttttaaaaaaccaactcacagtatgcatcggtaaacagtacaatgaatagtcatcctgttagtgtccctgctgggattcatggtaacgcccagcagtctcacccaccatggcttttgctccaacagtgcaaatgtcaacaccatgagaaaggcaaacagcacctcagcattgtcatgaaaacgattttcttcttacagatcacctaaaattgtctcagggatccctacaggtctgtgagctacattttgaaaacatctaatacagtgctaaaattttagtttatttttaatgtttgaccattacaaatgaggcatcaaatgaacttctttatgcattggcctttgtctgattttaagattatttctttcgagaaaaatttccagaagtatgaccattggataaataggtataatactttaatgtaatttttaggagacatagatttaaacgaaagccctttgaatcattaacatttattctttaaatttgccagatcagtataaatgaatgtattcatcttaatccttttgaagtgacagaaaccaactcaaactagcttatggccaaaagaataatttattgtctcttataaacaatatatttatgattttaggaaataattctattgaataattttttcttcaggagcttcttttcttctgaatacttatcatatagtataaaacttgtcagctcctttgcaagtacttgcaaacaaaagaaggaaaatattattttatgtggtattttattgcctggagagaaatggcagttgttgggatttggggcttgccaaatttttcagaatagtcgggaaaagctgcctggaaaaagtgagattttgagcaaagatgtgaaggggttcaagacagctcatggatacctggggaagggacatcctaggtaaagggaagagatacaaccacggtgtctagagtttgcctggcaagcttgaggaataacagagaggctggtgtggtgggagccaagtgaacaagaaaacactaaaaggccctgagtcagaaggagcagaaccttttcacgggggacttactagatcaggacttcggttttcaggacgtggggttttctgctgagtgagatgggggctttattggatgactttaaacagaaaagtcacatggccagactaaggttttaaaaggatgcttttagccaggcaaggtgggacgagcccgtagtcccagatactccagaggctgagacaggagaatacttccagtctagtagtttgaggttgtggttgtggtgcactatatttgcacctgtgaatagacactgcactccagcctgggcaacatagtgagaccccatctctaaaaagaagaaggacgcatctgattcctgtgctgagaatggtctattcggggaaagggggcaagtagaatgacctgttggaaagtgaatccaggtgagagatgatggtggcttggaccagggggagagcagaggaggttgggggtagaagacagactccggatctatttcgaaggtctattcagtcggttttcctagtggttggatacaggtgtgaggaaaataaagacatcaaggatcaggtcaggcttctggcctgaatatcaggaagaatggcattgctttctactgagtcagcagaagatgcagtggagccgtttgaggaaggcgattaggagtctagttatcgatgtgttgaggttgaaatacacactaaacaaagaagtggatgctgtcagtaggaaattagatatgggagagtagagttcaggaatccaggctgcagatctggtgacatcagtgaatagatgatgttcaacaccaaggcctgaacaggaccctcaggggactttgtgcactacaccgcagattttaacttcatatgtacaggcttccccagcccccagtcaggctcacattagaacccttcaccaaatatctgaaaataaagtctgacaaaaattcaaacaaggactgtttgaaatgtaagtttacctatttttagatttcccagattggcacagatccatgtattgactatgaccccattggttgcaaggtgcgagaacccaaattacctttgcttaagcagccaggtgcagaggctcactgctgtaatcccagctacttgggaggcctaggtgtgatgtggtacgcacctgtagctccagctactccggagactcaggcagaagaatggcttgaggccaggagtgcaagactgtggtgaactacttccaaaacacagtaacagttttacaccattcgcaatcttagcctttactcagaacttagaagggtcttaaataaaatgacttctgaacatttaagtttacattttaaaatattttaacctcagcactttgggagaccgaggcaggaggatcacttgaggccaggagtttgagatcagcctggccaacgtggcaaaacctggtctctactaaaaatacaaaaattagccaggcatggtggcacacacctgtaatcctagatactcaggtggctgaggagggaggatggcttgaacccaggaggcggagtttgcagtgagccaagatagcaccactgcactccatcctgggtgacagggaagactctgtctcaatcaatcaatcgatcgatcagtaaaatgtttttaaatgaaatattaatatataaagtaaattatactccaatggtcaggattgtagtttatcaaggctttttaaaaattaacctttactattttcagttaccaagtattaggggagggagataagaaattagctaaattttaggaaaagacttagaattttggctttccctgtggattaggattgaaagagactttcttattttgttcatgtaaatgcagctccactacttttcctgggagaccacacagtgaatatttcagccagctaattttggaagagcaaacctgaagccttaaaaattggcttccttgggaagtggaagtggcccacttgatcccggcaataatgctgctaacagggaaaccaaattattgttatcttgtccccaggaggttcgttttaaatactggatatagcggaaagtgtgtgcatatgtgtttagatgatatttggaaacaatactattttttcatcatgtcttttcctggcaatagtcataaccctttgcttattttggagcatatgcctgcaattttttttatttcaaagattgatataaataatatgcttattattgatggtggttgaagcttaagcagttctgaaatatatgtaactatccagaagtgcaagtttgctgccttcaaacatataggcagaagtaaaagtcaaagtcccttctttcacttcatttcaacttaacaagcagttttatatttaacacattttcaagctttgtctttcccattttaggtgccacattgaacttgaacggtgcttaattgcgtgttctaattgctggggatcaacactgccaggaaagttaattggctgctggataaaaatgtcaccttttatttatatttatataaaactttatagtttacaaaacactttcatctgtgtcaccttaattaatacagtgactctgtaacgtagataaagcataatcagggaaagaatagaagagagatgaggctgcgcacagtcacccagtaatacattcaagactcaaacgcagatgttttgattccaacacaacccgtggtgactctcagaagaataattcgtattgcagcgggaagccagggtaggagtggggagaaatgaatacaaagaacccaggaataaagctatttaaaaagtcaagacagacaacatgttaaaatgtagggcaaaagatattgagggactaatttaagagagatagcatttgttaaattggagagaggaaaaggagagaatggatttggtgaaagagggcaggtcagaacaagaaaggactccagaagctcttgcttgggagatggagaggctgagaggagcgatgtggcacctgagtgtcttggcgaaagcctttggatggcggggttggtcttaagtgcctgtggatcaccattctggcttcagaccatggggatttaaaaaaatagacaggaaagcaaactaaaattcatagagaagggtagttaaaatcacaggtaaataaatgtctaagaagcaccaagctttcagagtcatattttatgaggatttttaaaagtgaatgtttgccaatagtgagatgaaatggccatgctaggaatgcagagaacaacagaaacattcgcttttacatatttcattccatttctatatttgtggcgatttctcattttaatgtaccagcatttttttaccatgtcctccttcaaattgaagggagaattagatgtcactgccagggttttcagctcttgtgttggtggtactttgtgtactgtagcccaacagggacactgttctgcacattttgacgttaaaatcctgcttccctgcagctttttgtcctgtgctgtgtctcgtctgtcaccgtaatgtcttgctgtattgctgttggtgcaagtggggaaatgaatgctgagttaaaaataatgctgtgagtgtgtctgctcgccttccactcgaggtgagcggccggggatgccgtcttctaatgacatcattcttcaaaggctgggaacaaatgtcatctcgcctaggtggagggacagctttgtgcacagaaacagccttggcagtttccccactcctgctttcagacatttgctcattagctgttccaaccttggcactatcagcttccactgaattccaaacccaactctgttggcaaggaaaggtctttcattcttaatctgtcactttcttccactttctcctactatctctctagatactggagttacttgcaatattgtttatggaaaggacagcattttgagtttatttttccattttagttcctcattaaagtggagcaatggttaacttaagctccagtttgctggggtcttttgtgtgtggccatacactgcagtcatccacatattttcatatttatttttcaacaacgacttgggaattgcagagcttctattatgaataatacacgagaaatatagacctggggaaaaatagaatggtaacgtattaaatgtataatccttttatgttaatttattatttaaaatgagaatttatactctctttttaatttaataccctaatgtgagaaaagaaagctaatgaagtgggaactttcactgtcctccctttttaaatgacgcaagaaagcactcatgcttcaatatacttaaatggatgcattggctcagctaccctgggggtttatgctctcaagtgtctgcagaagagaggtaggatatcaaaattgagtgcaggactcagcttctatgggttccttcagacaggtttgtcctggaggtggaatgacttaaaattcctctattctagaaatcgaagcagacacctttctttaaaatatggcattttattaagtgttttataagcgatatctcaaattactttaccctaattggagggaaaaaaagactatgtgtaagattggtttcattatgaaagaatgctatatatatatatatgtataatatatatttattatataatacatatataaatatatgcataatttattatatataaatatatgcatataatataataaatatataatttattatatataaatatatgcatataatataataaatatattttgatatatataaatatatgcataaatatatgttatgtattgcatatattacattacatattgattttaaatgtatatacatgattttttacattgtaaataaaataatatgtatttacattttaaataaagtgatacgtatttcctgtgtatagtataatgttttgaaatatatatccattgtggaatgactaaatctgatcaaataacatataggttgtctcacatagttatcatgtttgtggtaagaacactttacattcactgtaaacatttttcaagaatacaataaattattagctacagtcaccatgttgtacaatagatctcttggacttttcctcctgaaattttgtgtcctttgacacacacctccccagtaactccagcccttgggaaccaccattctcctttctacttctataagatcaacctttttagattgcatatatgagttagatgatgtggtatttgcctttatgtgcctggcttatttcacttaatataatgttctccaggttcatccatattgtcacaaaggactacagctcactctttcttaaggttgaatagtcttaaggctgaaggtccttattttattttttatttttattatttatttatttatttatttatttatttatttatttatttatttagagacggagtctcactctgtggccaggctggagtgcagtggcgcgatctcggctcactgcatcctctgcctcctgggttcaagtgattctcctgcctcagcctcccaagtagctgggactacaggcgtgcaccactatgcccagctaatttttgtatttttagtggagacaagccttcgccatattgaccaggatggtctcaatctcttgacctcgtgatctgcctgcctcggcctcccaaagtgcagggattacagttgttttattttaacttgtccctttttttggcaaccattgtgtatgtataccatatattttttaatccattcatctgctggtgaccatttagccacttgaatccatatcttggctattgtaaacaatgccacaatgaacatggaagtgtagatatctcttcaacacactgatttcatatccttttcatgtatacccagtaatgggattgctagaaaatatggtggttctatttttaatgttttgaggaacctccatactattttctatagtgagtataataacttgcattcctatcaatacagtacaaagcttctcttttctccacatgttcaccgatgcttgtttttttcatgttttttataatagccattctaacatgtgtgagatgataacctcattttggttttagtttgcatttccctgataattagcgatgttgagcattttttatatacctgttagccatgtatgtcttcttttgagaaatgtttattcaggttcattgcccattttttaatattcattcaatttgcctattttcaaatcaggttgttttcttgctattgcattgtttgaatcctttatatattttggatagtaaccttttatcagatgtacggtttgcaaatatattctttccttctatatataggttgtcacttcattcactctggtgattgattcctttgctgtgcagaagtttttttagtttgatgtaatcccattgttctatttttgcgtttgttgtccatgcttttggggtaataaccaaaagtcactgcccagagcaatgttaggagatttttccctatgttttctcctagtagtgtcatagtttaggcccttccatttaagtcttaaatccagtttgagtttaattgtgtatatggcattagagacatcataaattaaagttaatgatctaattccatttttctgcttgtgggtatctagtttccccaacaccatttactgaaaagaccccattgtgtgctcttggctcctttgttaaaaatcagtttgctgtaaatgtgtggatttaccattctggtccattggtctatgattttatggaagtacaatgctgtttggttattatagctcagtagtatattttgaagtcatgtggtgtgatgcctctagctttgttctttttcctcaagattgttttggctattctggctcttttttggttatattggaattttaggatttttttttctatttctgtgaaaaatgtcattggtattttggtagaaagtacattgactctgtaggtcacttcaggtaagatgggcattttaacaacatgaattcttctcatccatgaacacaagttatgtttccatttatttctgtctttctcaacttctttcaccaatgttttatacttatcactgtagagatctttcacctccttggttaatttattcataagtattttagtttttgtagctattgtaaatgagattgttttctttaatttttttcagatagttcactattagtgtatacaaacactactgatttttgccttgtagctttatcatatgattatttcaataggtgtagaaaaatacttgacaaaatttaacatcctttcatgataaatattctcaacaatttagatacagaaggaatgttcctcaacataataaaggccatacatgacaaacctacagctaacattgtactcgagacaagttggaagcttttccttaagattctgaacaaaaaaaaaaagatgcacactcttgccacttccattcaacatgtcactggaagtctcagccaaagcaattaggcaagagaaagaaatacaaggcattcagataattcaaattggaaaggaagaaattaacttgtttgcaaatgacatgaccatatatatagaaaaccctaagacactaccaaaaaggattagaagtaataaaccaattcagtaaagttgcaggatacaaaatcaacatataagaatacaattcttttatttagttaaaattgcaagataaattatgttttataatacttgttgcacttgctgaacatgggaaacttagagaaggagagaattatgtagagataagaaagggaaaagaatgccaagcaaattactaacacttttgctgtctaattcataattaatctgcaaatacacacacgtttgtgcacacaccacagggaaaaactctttggcagtgctaaaaataatgccgtgataatgacattttaagtcagaaataacaactctcaattattcagaaccatgcggtaggatcttttatatgcattgactcaaaacacatgtaaattgtttaaatatataaattcaataaaattgtgtacttcatacacctatataacatttatatgcattatattttaaatataaagatatataaatataaaacacaaatataaatatacatatagttatatatgtatattatatataagtacatatatatgtggttacagatatatagatgcatgatacaattatagactcttagaatcttagggctataaatcagcttgaagttcatctagaccagcctcccatgtgatattcaacatgcccctggactgtaccccacatttttctagactcttcctgcacgatctgtgcagtggttcactaagctctcagccctttctgtttctacatggctgtgattgtcagacagttcttcctctgtctgacatacatacaaatagagatacatacaaatatgccttctctagctcttctcttctttctggttcgaatattccctctagagcaacactaaatagttccccgtttctccacataaagctcccagtcgtgcaaaagactaagctttgtcttcctggctaaccatctctagcgtccccatttgtttaaatactttgtatgcaacgaagttcagcagctcctttcctttgaaggacacactgatgtgtctattttgtctcaatgaaacatagccctctgggcattttctaatgaataaaagaggggaatgagagtgccacctctgtcctgaagacaagaacgcctagttgcagcccatgtcccactgttgagccatggtttgggactcatgaacaaaaatcccaatggtgaattttgtttttgttttgtcaacttttggctgacaccacaccattatcatctgtccatgcaagatccttattttgttttattttaacttgtccccccttttttcaaccatccaccaattctggtatcgtttgtccctgtctcataggcacagacttatgtgtacttaatatatttattttaaattaattttctggcatccttatttagacatgcatgtaaatatatacaataacagcacaaaagtgaatgcttagtttgccccccacccagccctttgactctgtacaaatactaccatgggtatcttataaatgtgtccatgtgtagtattaatattactagagggccagtagtagaattgttaggtcatagaatttaacttcactaataattgcatagccactctccaaaattcctataccagtttactttaccaccagctatgcattagaggtcccagttccccgcatcctggtacctgtgtttctatttgtgacaaagctgattgatgtaaaggagctctttgttttaatttgttttcttttcattactattgtgcttgaatgtctttttatactctcaggagatgtctgaggatttcatctatgcattgctttgtgcatttgctatcactcctgctacttcttcctgctttgctgtagttctttagtataaatatgaatctcttattacttagaaatgattgtgaatatcttttccaaggctgtcttttctctcttaactttgcctttgtcttcatttggaccttgtttaagaaatttatgagctcatgaagatgcattcctatttttttctgtatttgttctatgtctctatttttgctgtttgcatttaggccttcaacccacactgagcttcacagatatagtaaagctggggtccaatatattttctatctatatcgagtcagttatcccaatatttattaaatgacccatgttttcttctcctctccatctaccaagataccatgatggtgctgtcagaggcagtcttagttctgtgaaatatattgactacctttttatacccttgtctcactgtaacatatttcagcactttacttaaaaaaaagcctcttcaagtcagttattattaaccaagcttctaaagagctatgaccttttctaagccaacgtcatgaaaaatacttctcaagcaaataatctattactaacaatccttgtaaaaaaactaattggaaaaataagccaagttttaaaatgaataccagtgattttatgaatcttgtttacttttgttattaagcctggttgtcgtcacctctggttggggtcacatggctttgcttccatcagaagtccatataaacaaaaataaaataattgtacctcatctagatgacacttttctctaactaaataagtaaaacatgagatatgtttcattttcttgatgccttgatgattcaaatggcttttcttttcatattaaaaatgcagaaaagtaactcagttttattacagtcttctgtatgaaggtattattgctctcaaccaggggaaacataacctgtcatcctgctcagaccatggtgactctaattgtttacatatagatattatcataagtttttaagttcttggtcgttttaatcttttaaagaaactatttcaacataatatgattatggctttacaatacactccataaaaataactttcaagagatgtttcatatgattgaagactcaaatggccccaagaaattatccagttctttccaccacattcccctttaggcatctggttgacaatattgcagggcatccattttttttggaagtgcattggaaggagacactgccatgcttctcagagtttgttttactcttttacgcccccaaatttcaagtagtttattttttccctttattgtatccaacttgcatcttttgtgtttctctttattataattctactttatgccttgggatatctttttcttgttcctaaaacattttaattatttttttcctcccatggacttacttgataattttaaacaatttttgggaaaaaagttatttgccttccttttatttccttttctctctctctcttttttttttcttttttttttttttttttttttttttttgagacagagtttcactcttgttgcccaggctggagtgtaatggcacaatatcggctcactgcaatctctgcttcctgggttcaagcaattctctacctcagcctcccaagtaactgggattacaggggtgagccaccatgcccagctaatttttgtatttttagcagagatggggtttcactatgttggccaggctggcctcaaactcctgacctcagatgatccgcccacctcagcctcccaaagtgctgggattacaggcgtgagccactgcacccagcccccttacttcgttgttatatttatgactctttacctcttttcacagtctagcagtctaaaataagcatcctatagaagaactactttgtttaaaatcattgtagaaaagttagctactcttattcctgatatattccaattattagagagaaaaactgaatttttgctcagaacactagctaaacttgggccagctgaatgagcaaaaacaacaaaacaaacacagcattttttttaagttagtgagcaacaattttaaaattcaccttttaaacgttttcccttgcttctttttttattcttcttctatcttttccttgttctgagggaaaataacaagatacttttcatcatgtatagaggggtatatttgaaagagaactcagcactaattctcttctagtcccagtcccagatgagttaaagtaatgtgaatggatggttgaagtatatggagagtgtgtcacacacagacctggttttgttattaatggtgcatgcatttttgctgtagatgaaacaaaccattgtggttgggtttttcgggaagctgactctgagatggatgctagtgtgaagagtgtttatcaaggagtgccttatgatcaacaaccgaggagggaaggacaggaagaaggactgggcgaagaaagagtgagctgggatgcaggccaatgacagtgagctctggagcaagaacagtccttcagggttgtcctgagtttgggcagaattgctcctcaatcagtcactagattgaggacactccaaaaaagagcctgtccttgggtgaagtgggcctctgcagctgagacaatctccgaggtggccaataacttccagatgacatcaccccatgaattggtggtaacatgtcctttcttgaaaggaatctggtcagtgcaactcctcccacttacgtagatgtcaaatggctatacatgtgggtcttaaacaccttttcctaaacacattttttcattcatttgcgcccactggccgggcgtggtggctcacgcctgtaatcccagcactttgggaggccgaggcgggtaaatcaactgaggtcaggagtttgagaccagcctggctaacatggtgaaaccctgtctctaccaaaaatacaaaaattagccaggtgtaatggcgggcacctgtagtaccagctactcgggagtctgaggcaggagaattgattgaacctgggaggcggaggttgccatgagccgagatcatgccactgcactccagcctgggcaacaagatgggaaacaagaatctgtctccaaaaaaaaaaaaattgctcccgctttctataatgacatgagtccaatatttcaaattagaaatgagaaatattacagtgtaccatagtgtattgtgttgtagttcatagctcaattggacctttgtcatcagaacaagtttcaactcaaaaaatctctttagttttgtgagtgctaagatgttttttaaaaatgtattcaggtaatacttgtgcgtctgctgttaatgagatcaagtaataataggatggtcactgccagcaaggtgttggggtctgtgggagaacccacagacaaatgatggcaacacacgacaggaagcagcaaatgtcctgggcgaggggcagcagaaggtccaaaacagcagccatgacacctggcgcaggagaacagcagggagacaaagaagacaaatgcagacatcaacacaataccatcagagaaatatgcagtatgtgttttaggagcagaggaagtggacatttatctaattctgggcatagggtaggctgagaagtcttgaggagccaaaaaagaatgtccaagaaaagctgagttgaatctcaaaagggtctagcgcctgaaacggtttccaaaagcagaaacaattgagtgtagttttgccattataagatgatcagagtgagaatggggctcggacagggtgtggggacagaggtgggtcaggtgcagttgctcacatgtaagagcccctatggctgacacaaaggatactcccagtaagcgaaggtctgcatctgcacagagaggaccaggcctcggagagttagcacatcctgctgaatcctaaaggtgttggagcagaggtaaatgctcgcagcaatgttttagaaacattaatctggttgaggtgggtaaggtatatcacagtgcagaaagatgaaaaaaaaaaaaaaaagaatgaccagttaggacacaattgaaagagttgtaattaaaaaggtgatagtactgtgtttggaaaaagagaaaccacacaaaagacatgttgagaattggagtagacaatacatagcagcacactctcagcagctggacacaaaaagaaatgcacaactaggaacgcttttattattcgaagcttcttgcaaccaaaatattttgctatcactactaagaacagagaattgaagaagcttagattaaggggaaacttgctatgtttggtttgggatttgagatacttctgagacatcaagatgaagatattgacatactactgaacaagcaggcatgaatcttgagaaggagtttttgtttgaaaatttagattaggagtcaacagcattgagctgacagctggggcaaaggaggtgctgagaccatcagggagagagaaggaagaacaaggccaggtcaggacactgaggaacaatggttccattagcgtatgattagtaagagacattcctttccatctgaattgttgaactatttattcatggttttcaatctcataattcaattttgtaatgtgtagtatgattcttcaaatgaatgtgatatccaccctcattaacttttgccatgggatctatgaactctcataaactcttgtagggtacttatctatcttttagacatttaaagtaaatacacataaatgaacagagatggtgactgatagggtttggctgtgtctccacccaaatctcatcttgaattttactcccataattcccacgtgttgtgggagggatctggtgggagataattgaatcatgggggcagtttcctcatactgttctcgtggtagtgaataagtcttatgagatctgatggttttatcagggatttccgcttttgcgtcttcctcattctctttgcctgatgccatccatgtaaggtgggacttgcttctccttgctttctgccatgattgtgaggctcccccagccacgtggacctgtaagtccaattaaactctttcttttgtaaattgcccagtcttggatatgtctttatccacagcatgaaaatggactaacacagtgacaaaatttattattttaaagaatatattactggcccatttaattaacttagaaataatttcaaatcatatttactataaaaaaattgtgtgatacaattctaataatggaacaaagctaacactgcaatggccatattagaatctttattgtgtaaaataaagaataattctatataggaaaaacaatatgcattatgaaataataccaggaaataaaataattcaatccactgtttaaaattacaatataatatgaggaaagatttttatcacatcagtaactatagcggacataatgttcttctattttatttcatttaattttaagttccaaggtacatgtgcaggatgtacaagtttgtcacataggtaaatgtgtgccatggtggtatgctgcacctctcaacccatcacctaggtattaagcccagcatgcattagctatttttcctgatgctttccctccccttacccatgctttcacatgctttcttcctctccctgtgtccatgagttctcattgttcaactcccgcttataagtgagaacatgcagtgtttggttttctgttcctgcattagtttgtggaagataatggcttccagctccatccatgtccctgcaaaggacatgatctcattcctttctatggctgcaaagtattccatggggtatttttaccacctttaatctcttggtgcccactctgagtgagaattgtgaaatttggcctgcatgatttagttgttagtatggctgtggtcaaaaagtcaaaagataacaagtgttggcaaggctgtgtggagaaaatggaaccccgtacagtgttggtggggatgtaaattagtgtagacatgataggaaacaataggaagtttcctaaaaaaatttatataatccagtaattccactactgggtgtatatccagaggaaatgaaatcactctgtgaagggggtacctgtgatcccacgttcatggcagcactatccacgacagccaagacatggaaacaacttaagtgtccattggtagatgaatggataaagagaatgtcacacacacatacacacacacacacatgcacacacgaacattatttagcctttcttgtttgttttctccaagtcacagcaggttcagtgccttgacactttctgaaactaaggaagacatggatgattgggtccagctatttttttctgtccatggggaacatgttttcttagaatggagaatgtggccagagaaaactttggtctgctgtttttacttataactcctcccctaaaggaggtatacttctcatttgagtacaccttaaataattcaaaagatgtaaatttatcaaaatatactcaaaactcctacttcattcatccacagaaattcaaatgtggtatttcaaatctatgtctagagaaaaacagatacttgaaacattttttaaagttttgtatgatttgggctattacaaatatgcccaagacacagttctttaaggaaaccttaaagatagatcctaaaagtcatctccaccacactgcaaggacaatgccttgtccttccctgtccttcccacccagaaggcagggccaaagaattccccactggctcactcttgcctttttcgcctaggtcaatgtcagttaatatcagctcatattgaaccccgcggggagcttggagtgagaggctaagaagggaaactaatggaatctaagttgatgtgacccacgcagcctctggtttcttttagcacccaccggctccagcaatatccttatcactccctcatcatatgtctctgcatcttggcctcctgcccttcctgctaaagcaggtgcaggtcacgggaccagcagcctaagtcacggtaagctaggtgcatctctggctgctgctggttggaagtcaccgatctcagggaaacaaactcacatagcaattcagagttggcgcgaggaccgtacctaaataaacaaggccagatattgactcaagctccccaactggccctgccagcagaggggagagttggcacagtagttagaagtcctcggcccctaggctaataagactatgaagaggagcttcactcttgtccctgccatgtcgtcattattaagtcctggaagtgtctgcctgctcctcttttctaagtcattcttttttttttttttaattatactttaagttttagggtacatgtgcacaatgtacacgttagttacacatgtatacatgtgccatgctggtgtgctgcacccattaacttgtcatttagcattaggtatatctcctaatgctatccgtcccccctccccccaccccacaacagtacccagaatgtgatgttccccttgctgtgtccatgtgttctcattgttcaattcccatctatgagtgagaacatgcggtgtttggttttttgtccttgcgacaatgatagactggattaagaaaatgtggcacatatacaccatggaatactatacagccataaaaaatgatgagttcatgtcctttgtagggacatggatgaaattggaaatcatcattctcagtaaactaagtcattcttaatgacttcaggattgtctaaagtgcagagtgtaaacatatgttcatcatcacctctgaaagtttttttctaaaaaacattattcaatcaaaatgaacaagacatccaggctcggtggctcacgcctataatcccagcactttgggaggccaaggcaggtggatcacatgaggtcaggagttcgagaccagcctggccaacatggtgaaaccccgtctctactaaaaatacaaaaaaaattagccaagcctagtggcgtgtgcctgtaatcccagctacttgggaggctgaggcaggagaatcacttgagcccgggaggtggaggttgcagtgaggcgagatcatgccactgaactccagcctaggcaacaagagtgaaaactccgtttaaaaaagaaaaagaaagaaaagaaaaaaaaagaacaggacactatttatcccactagttgtgggaaataaaaaagataaacttgatagatctcctgccctcctgggtcactctacttaagaaaatgggcacgtccataaatcactgtactcacttgagtcatcaatgtgataaattccatacaagagttttgaacaagagtgagtagaggaaccgcttacttgtgttgtatgtacattgtggagaactgtatcagactgggtcagtaatctaaaatttagctaaacgatgttgttaagtagcagaattgaccagataaccagacttatgggtgaggagatcttgaaggtataccccggactagaaactcccacctgctcacagcctcatcatttcggagtcacgccttgcactgaactggacagtaaatagccctgtggctgcgcagaagagctacttgctgtctatttcaatgcaagctgataatgaactgtgtttcattatcacctcgttacacatgaagagatagaatcgcagagctaaataaactggatcaagataacactgctaatcacccagaattgacgagcaccccacccatgattttatcaaagtcttatacgcctcttctctaggagaaatcaaagcatttccctccatgaagaagaatatacaattaatttttaagagacaagacagaaatatatcagtctgatctaatattcttgttaagggtttagatagagtaagagtcaaaattgacatttggcagtattcaatggctctgagctgcctaggaaaaggacccccgccattatgtagagtgaaatacacaagcctggtaataaatgacctttatcagatatttacgtacttcttgtagaaagggtatgtcaaaagcggtgtgtgtcatattcaggatttctgctcctatgatatacaagcttttactgtcagcaagattcagataatttaccttatttaggtgatatcatgaatcaggtaatcagtgtgtctcaaataggaggttcagctttcccaaaatcatgagaagagttttctaatcactggagttactttgtgccatcgatcttatgtcttatgaatataaaatataaggcttaagacgctttaaaaattttatgcatttgtatgcagcagacttgcaactcacagctgatgcaagcaaggcaacttaagcagtgaagaaagaattgacatgattgacaaataggtcttgtgatttaatttacattaacaatgatgtaatgtgcatactgacctaatgtgtccttacataatgtggcaagcaaagcaacacatagcaaacctaattttgacattcttctgggaaaacgcttttccttatgactaaacttttctttaatatttattttaaccattttggaaaggcttttttttggtagatatgttttaaaatattttaaatgtatctttttatttaatatgttaaccgtgacttataattcagaatgctaattaagtattacgattttgtattaattacaaaaatgctgactactaagggcaatgtgctcccaaacaaaatgtcatccaactactgtgtgtgttgcgtttttgtgtctgttctttataatttacttttagtttctcaccctcctccttttgcttgccaattgtggcttcttactaagccctcttcaatatgcctgaactcccagaatctgatttaggccaagatatcagataactgacagtgttgtaatgatttaaaataagatgttcaaagcaagggattatccttggagtgatgtgtatgagatttagtgcattagctttctgacactggtttttcagtgctttggaagtgtacttcttgattttcagccctgttgctttgtactaaagtaatgataaaaatattccttaaataccatacactgatgaattgcaaatattttggaattatagaaaacacagggttttggttttcgttttggttttaatgctgattcttctatagctacctcttacttctgttcttgaaaatttgtatgtgcatatatttcctgtattctataactctcttatgctctaaagggacattctaatactttacaattatttacaacctacactctatgttttccttttttttttttgagacggagtttcgctctgtctcccatgctggagtgcagtgacatgaccttggctcactgcaacctcagcctcccgggttcaagcaattctcctgcctcagcctccctagtagctgggactataggtgcacgccaccatgcctggctaattttttttttttatttttagtagaaacaaggtttttccatgttggccaggctgctcacgaactcctgacctctggtgatttgcccacctgggcctcccaaagtgttgggattacaggcgtgagccaccacacccggccttcttattaaatagctagattaaaaaatatgctatgtcttacctttctttcttgatttggagaaagtaaatcctcacgtattccttctccctgttgtaactgatagagaaaattagcccagtaacctttcaacttacctgttttttcctcatcttaaaggcttgtgaaatagaacaaatgctaagaaactgattcagatacacaactaagtttgagaattactgtgttaactcattcagagctcaaggcagcactctattttataaataaggaaactgagaccctgagaggggttaagtaactgtagtaagtagcatagctgaacttaaaccaaagtagcctggctccaaagttcttatcttagaaaaattgtctgtaattcagacagtaagcaccaagccaaggtttgtctgagtatgctgacaaccaggtttttgtgtccaggaaatcaaaggggaggaaatgtaattattttctttaataaagcatagcaatttagtattaataatatttacatatatagtgagcatttatgccacttgggggcaagagatttaaagaaatacaagcacctttggtacaacatgacattttctccagcacattccaactgagaacgttcatacctcagtctgacccgattctctccaccagcactggatagaatctcatcctgagacctttatctcttagcatcagatcagcccttttcaatcccaaagatctaactttacatggagaatccacaggaggattgacattgagtatgcttgtcggtacctttgaccatttaaaaaaattaatttccctggtaaaacctaacttgagctacctacttcttcgacctctggctgtacttgcaattttgagttctagctcccaactgcttttgaaagcagacagccgtcatagtgataatacgaaataagagaagcgccatggctgcacttccttgctgtctgcggcctatggctatatatggaagctccactggcagaggctgatgggttatgctcattgctgtgtgcccagcacgttcactgctgccacacacatcccaggtgctcaataaacatgacttgattgaatgaacaaataaatgaatgaatggttttctattcaaatttctcagccggatcccttacctcttccttaagctgatagttgaaatggacttacaattgttgaataaactgtagaaatctttaataacttcattaggaaaaactcgtaatataataattggtttatattagattatcacatgattaatcatcttagtttgtactcttagtcatttccaagcccctgcatacaaataaacctttttctttccaagaatgtatgcaaaaacacaaaaaaggcttacattacaggctctgatattagttatattgacatgatttaagccctccgagaatagttaactagttctaagaccaaaagggcaaggtaacatctttgagtatcacttttcccatctgcaaagtaaagcaataaataactaatccgtaaggctgatgaaagagcatattactttgctcataactaacaagtaacagttagagttcaaatgtggttcatctgactccattttaactatttcagaatgttaataccctatgacatcatctaggagggcactgaggaagagagttcctaaggcaaggtggacaaaacaggcatcactcagcaaagctgaatcaggaaagagctttccaggctgagtttgcttgcagtgtccatggcaggccaggctgaaggctataacccgacctccttagcaatacatcagcaagtcaaataacctgccacggaccagttcacaattaaaagttacacacgtaaagtgtgcaaaactaagagatgcaaagtaaagatgtagttattctaatatgaaataagaatttataattaatggttgttattagttggacataacagagaactttaacaataaaattggaatatttattttacttttttttttttttttagttttttagacacaggctggagtcacccaggctggagtgcactggtgccctcgtagcttactgcagcctcgaactcctgggctcaagggatcctcccgccttggcctcctcagtagctgggaccagaggtgcacaccatcgcacctggctaattttttaaaaaaatgttgtagatatgggggtcccgttatgttgcccaggctagtcttgaactcctggcctcaagtgttcctcctgccttggcctcccaaagtgctgggattacaggtgtgagccaccacatccagccaaaattggaatttctgcttcttcagtgggtttagaatatgcctatttacaaggcaggaaacaattagaaggggaacagtaattgtagtgtcatagtcgcaaagtaggaaagaaacctcctcttgtatacatcattttaaaaggctttgaaggaaaaccaaacctaaatccctctttcacactatttacactacagatatagtctgaaatgttttcattcaaaaataatttttaaattaaagtttgttgaacaaaattaacttgctgaagtacaaattgaaccatggtttttatttaaaatgatgagaacattcaaataatagaagcagaatttcaaatttgctacagttcctgtatttctatgctgtatctatgatcgtctgtactaccctttcagtgccgtatacagggttaaaggaaaagcaaatgtagaataagcacagttcgttattatctttcttttttcttgcagttccgcctttcatacaaccctttgagtttccaagattctccattgggcagcgggtcttcatcccctgtgttgtggtctcaggggacttacccatcacgatcacctggcagaaggatggccggccaatccctgggagccttggggtgaccattgacaatattgacttcacgagctccttgaggatttccaatctctcgctcatgcacaatgggaattacacctgcatagcccggaatgaggccgccgctgtggagcaccaaagccagttgattgtcagaggtgagcaaaggatcatgagccatgtggcatctgtagagttgatttaacaatggtttaagatgatggggcttgaaatatttcgaaaataactggaacttagaaattcagttttatctcactaaaaaaaaaaaaaaaaaaaaaaaaaaatacgactctaaacccaaccatgaattcccctaaactccaagataaggttttatttacctaaaatatgttttaaataattaatagctaagaaggtgggaaccataggatttaattcatgaaataaggcttccgtatgctaagccaatgagttttgaggactaacgtccgtgagcttttgctttattgtattcatataatatttttagtatttcttatttcaataaatggttttttaaaaaatatgtctcaaagctatgtatcaaagtttttctaaagagccatgaaatagcttttcataatgtttgttttagttttagaaatgtggttttctttgcccatctattctatttagcattaaatctatcattattttgggacgccattgcaacgttttaaaattaagcagagtatggtagtacttattcaaaaaaattaaaatagggtaggctaacttgtagaaaactggcagtaatctcattacatctaaactgtaagcttcagtcttattttgaacttctattcaagtcaccaaattcccattaaggctcacactcttcatctatgaaataagctgctagtgttctctaatgtatatcaaacacagacattctgtgatgtttatgattctccaagagtactatacattaatctaccattacaatattcatccacattgcaaaagtaactgtctgaagttaaagatttatattaacaatgattatttgcattttaaaattccccagattgtggtcccagagtggttgttaggagggggaggatttctgtaatttcccagagagtggagatagctctttcttgagcaggagattctcatgtccttcttcattccttactccttgtccccttgatacctcttcttccttgccagctgggaagaaatgcactttttatctacctgccagcaaaaggaagtgacacagacttagaagtcataggaagaaactaactttgtatttctgaaaaaaaaaatttccaggtgaataatttagaaaatatatattcaattagacacaaacttagcagcctcatgacatttttctcatttccaccttgcactttggagtggaagaattgggatacttgattttttcccaaattttgaaagataaataaaaaagggagccaacctagtatctgtttcccaagcgttttcttataagcagagttaactcttgggtttgtgaagggcaaaatagtacatcagcctgctttctatataatctgctctgaaggatccaggccaggaatctgaaacgtcagataaaaatgtacggggatgctttttgtacaacttgcccttgcagaaaaggcaaccagaagtttttaaccaaggcaaaatcagatgagctgaaaatgagcctagctatttgggataatgtagctgatcatgatatgactgatgtctccatgtgattgttcttcaaatatgttaaataagctttagttaaattaatattaaatcaccagtgagataatgcagcctagaggaagaaaatgtgcttcacaaacaggtcagtgtgactggagaaacaggcagggacaaggtgatgtgggactgtggttctcaatccagacagttctgtagaatctcctgggaggcttaagaaaacactgatgtgcattttttggtcccaatctacaccaattaaatcataatctttaggggtaaatccatcttccagatctctggggaattgttcttttttcccaaaaatcactagttagtggttctcaaactttgttgtacattcagattgcatagggaggtctaaaaaggtcctgatgaccaggatgaagctcctgtcaattaaataaccatctttggaggtgggacccaggcatcaataatttgtaaaatccacaggtttattctaatatgtagccaagtctcagttccagccccctgagtaattagaacgtgcagccattttgaggtgtggattttcttctagattaaagagttggcactgttgactttaaccaccacagcactatggcctgattgatctttttagttgtcacactagtagctgtctgaagaatggactgggctagaaagcaagaagagtagttaacaggctatttcagacattcagacaagataaaaatgccttggatgaaggtgttaatgttaaggtcatgagaagcagtggaattcacaatctattttggcggtaaagcaaataaaacacgcttatggagtgaatgttgcaaatgagataaagaagaacctttagtggaatcatgctttgcctaataacaaggtgaatgaaagtgtctttagcagaagcagagaagaaatgaggaagaacggtattgacaaggggaataatggtcaatgatatgggagaagcacctgtcccagcagtcactagggcactccagcatttaaggccccagaataagagaaggaggaatcagcagaagagacgaagagggaaaaggagcagcctgtaaaggaggagaaaatccagtggactgtggcactctagaagcaaaatcagaaataaatcgagaaagagaatattaaacagtattgaatcctgctgaaagtagacaaagaggaaaaccaagagttggtcactggtttaggaagatggatattgtttatgaccttgatggatattgtttatgacctggtgtcattgcagcgagggcttgattagaggagcttcagaaaagaaagaaggtcaatgtgcaggaactcagaaaacacaactatttttatatttttaggaattttgctatcacaggaggcagtaaaatggagacaaagttggaaatggacatggggcaagggcaggagttatttttaagactggatactttacagcctgctttatgcttatgagaataagccagtagagaggaaaaaaatatgtgtcaagataaagaggagattattacaggatcaaagtccttgagttagtgaatgcaaccagaattctttgtaccagtgcagtagtacgttcaaagtagtataataacaaccatggtgtgaagctccagtaggtagcaccaacagaaatgattgaaaattatagggaagggggatgttttgggtcaaagaagtggaaaaacaaaaattatctaataggaccatcacagagtaacaggtaacacatttatcctcctactacaaaccaactataaaattggtctaatatatataagaactgctttcaggaacaaaacaaagtgcatgaagtcagttccaaattcaccccagatagctgcttggggtactttctgcacatgacagagagtgcagagcccaaatagatcacagtgatcttggcaggtggagaaaacagagagagaaattgaaagatactaagatgattactgggtattgaaggacaagctactggagattagggagctattcaaagaaaggtctctagaaatctgtacagggctcctttgcagtttcagctgaatactgttcttcacatgcacagggtgctagcagaagttgcacattgcttgggaatgctggagttctaactagccagaataggggaattcagccgcaatctcaggaatgccacaccctaggagtaggactaatctatccccagcataagggttactctagaccagccctaaaagagcctaagaagattcttggcaagataaaacttctccactagtaagttaattgtgtgcataaacaatatttgacactaaaaaggaagacaacaaaatccagacccccaacagcatagcgtatccacaatgtactgcattcaataaacacaggcacacctgattttatcacacttttcttttttgttgttgttgttgtgtttttttattttattttattattattctttaagttttagggtatatgtgcacaatgtgcaggttagttacatatgtatacatgtgccatgctggtgtgctgcacccatcaactcgtcatctagcattaggtatatctcctaatgctatccctcccccctcccctcatcccacaacagtccccagagtgtgatgttccccttcctgtgtccatgtgttctcattgttcaattcccacccatgagtaagaatatgcagtgtttggttttttgttcttgtgatagtttactgggaatgatgatttccaatttcatccatgtccctacaaaggacatgaactcatcattttttatggctgcatagtattccatgatgtatatgtgccacattttcttaatccagtctatcactgttggacatttgggttggtcccaagtctttgctattgtgaatagtgcctcaataaacatacgtgtgcatgtgtctttatagcagcatgatttatagtcctttgggtatatacccagtaatgggatggctgggtcaaatggtatttctagttctagatccctgaggaatcgccacactgactttcacaatggtagaactagtttacagtcccaccaacagtgtaaaagtgttcctatttctccacatcctctccagcacctgttgtttcctgactttttaacgattgccattctaactggtgtgagatggtatctcactgtggttttgatttgcatttctctgatggccagtgacggtgagcattttttcatgtgttttttggctgcataaatgtcttcttttgagaagtgtctgttcatgtcctttgcctactttttgatggggttgttttttttttcttgtaaatttgtttgagttcattgtagattctggatattagccctttgtcagatgagtaggttgcgaaaattttctcccattttgtaggttgcctgttcactctgatagtagtttcttttgctgtgcagaagctctttagtttaattagatccaaaaagaatccaggaccagatggattcacagccaaattctaccagaggtacaaggaggaactggtaccattccttctgaaattattccaatcaatagaaaaagagggaatcctccctaactcattttatgaggccagcgtcatcctgataccaaagctgggcagagacacaaccaaaaaagagaattttagaccaatatccttgatgaacattgatgcaaaaatcctcaataaaatactggcaaaccgaatccagcagcacatcaaaaagcttatccaccatgatcaagtgggcttcatccctgggatgcaaggcttgttcaatatacgcaaattaataaatataatctagcatataacagaaccaaagacaaaaaacacatgattatctcaatagatgcagaaaaggcctttgacaaaattcaacaacccttcatgctaaaaactctcaataaattaggtattgatgggacgtatctcaaaataataagagctatctatgacaaacccacagccaatatcatactgaatgggcaaaaactggaagcattccctttgaaaactggcacaagacagggatgccctctctcaccactcctattcaacatagtgttggaagttctggccagggcaattaggcaggagaaggaaataaagggtattcaattaggaaaagaggaagtccaattgtccctgtttgcagatgacatgattgtatatctagaaaaccccatcgtctcagcccaaaatcttcttaagctgataagcaacttcagcaaagtctcaggatacaaaatcaatgtacaaaaatcacaagcattcttatataccaataacagacaaacagagagccaaattatgagtgaactcccattcacaattgcttcaaagagaataaaatacctaggaatccaacttacaagggatgtgaaggacctcttcaaggagaactacaaaccgctgctcaatgaaataaaagaggatacaaacaaatggaagaacattccatgctcatgggtaggaagaatcaatattgtgaaaatggccatactgcccaaggtaatttatagattcaatgccatccccatcaagctaccaatgactttcttcacagaattggaaaaaactactttaaagttcatgtggcacaaaaaaagagcccgcgtcgccaagtcaatcctaagccaaaagaacaaagctggaggcatcatgctacctgacttcaaactatactacaaggctacagtaaccaaaacagcatggcactggtaccaaaacagagatatagaccaatggaacagaacagagccctcagaaataacgccacatatctacaactgtctgatctttgacaaacctgagaaaaacaagcaatggggaaaggattccctatttaataaatggtgctgggaaaactggctagccatatgtagaaagctgaaactggatcccttccttacaccttatacaaaaaattaattcaagatggattaaagacttaaaccttagacctaaaaccataaaaaccctagaagaaaacctaggcattaccatttaggacataggcatgggcaaggatttcatgtctaaaacaccaaaagcaatggaaacaaaagccagaattgacaaatgggatctaattaaactaaagagcttctgcacttttcttttcttcctttttttttttttttttttgagacgggatcttgctctgtcacccaggctgcagtacaatgggccaatctccactcactgcaacctctaccttccgggttcacaccattctcctgcctcagcttcctgagtagcttggattacaggcatgtgccaacatgccaagctaatttttttatttttagtagagacaaggtttcaccacgttggccaggctggtctcgaactcctggcctcaggtgatgcaccccacttggcctcccaaagtgccgagattacaggagtgagccaccatgcccggccacactttgctttattgtgcttcccagatatcgcattttttacaagttgaaggtttgtggcaatcctgcatcgagcaagtctatggggaccattttttccaacagtgtgtgcccacttcgtgtctgtatgtcacattttggtaattcttgcaacatttgaaactttatcattattattatgtctgttatggtgattggtaatcagtaatctctggtgttactattataatgttactattataattgttcagtagccatatgagatggcaaacttaatcgataaatgttgtgtgtgttctgaccactctactaaccaaccatttcccagtctccatttctcagcttccctatttcctaagacaacaatattgaccatttctcagcttccctacttcctaagacataacaatattgaaattaggccaatgaatggccccacaacagtctccggtgtttcagtgagaggaggaatcattcattgcacatctctcactttaaatcaaaagctagaaatgattgcattcagtgaggaaggcatttgaaagccaagagaggccggaagctgggcttcctatgccaaactgtttgccacattgtaaacacaaaggaaaagttcttgagggcaatgaaaaatgctactccagtgaacacacaaatggtaaagtgaaacaacctcgttgctaatatggagaacgtttaaatagtatggatagagaaaaccaaaccagccaccacattcccttaagtacaagcttgatacagggcaaggccctaactctcttctatgaaggctgagtgacgtgaggaagctgcataagaaaagtttgacctggggtcattgtaaagcttagcacattgtttgatagcctgggttagtgggaagatttgtaaagacttgatctaaaataaattagctgttgtcttgaagaaaatataagaaaacaaaaacaacaccccaaaagcaaaaatctcttagctgttatgtatgagccaataagagccaaatctcatagctcttatgacagtggactgatggtttccctgatatcctgctcagtggagtgaccttggcattgattaaggtattagaaataacgcattaggcttcatgaaagagcactcctgccctttgcttcctgttgtggtctctagaccactcacaggaaagcaccaacacaacagttcctatctgtgattccaaaggagggccgttttctcacacttttttatatcttctgatgggtcaatggtttctggcttttaatggtgaactgccacatagagaaacaagcacattggctaaaatagttgactgtcagttgacaggaaaaatgaaaatcatagaaggttgctattttattgccatctgttgatccaatttttgatagaattctcatgctatgattttacttcattcattcattcttacacaaaatatttcttaaatatttgttttataataggtgctgttatgagtgccgaggataccatggtgattaaaataaagacaccaagtctctgcccattaaggttcaaagtctagtgaagggaagagataatgaacaaacaatgtcagttatctacaaggactatgaaaaataaacatgttgtacgtggattgagaaagatggggatgaaaatagtattttaggtaggctgggcaggggaaggctttctggagagatctttgagcagagacttgactgaagtgaaggcgtacgtcccagggaattgtaggaagcgagttccaagcagagagaccaacaagtctgaagactgagtgtggagtgagttttgtgtgttcacagcccagcaagaggcccaaggtgcctcctattaagtaagagaggacagaaagtgtaaggcagagatataagcagaggccaggccatctattctcagaatgatgggaaagcaataggtttaattgtcagtgtcgtaaattaaatcttacctagactttggccaagtcccatctcaactaaatgtcaccaagtagagaatggtggtatttatccatgcaccccctcccacctccaccaaatggctttcattaaaactgaatttctgcccaggtttacagctagggaaacctaaattcattctttggaaatatatagcaacttagaagccatggcttccaaacataaaacgctggactacatttaaaactagaaaaatgcctgtcttattataaccatagtattatttctttaaaaatgaaacaacagaagtaatccaccccccaccaacacacacaaaataagcagatcaagccaaagacctctgtgttttaaacaaccttcattttaggcaacaccaggagtaaacttcctcaaagaaacctatttgaaacttcagatactctcagcctatgtggatcccatgacaagattttggtattttggaatatatatcaaattgttctttttggggagacaggagtgctggttatgtgcacgtaattatgattcagagaagtgtttggcaagtttagccatattgcatcttggagatgtgatgtaattatgtagttgaacctattcatctctttaattactcttcctccctaccagaaaaaccgctctgtattagtccatttttatgctgctgataaagacatacccaagactggctaatttataaagaaaaagaggattaatggactcacagttccacaggtggctgggaggtgaaaggcatgtcttacatggtggcaggcaagagagagcttgtgcaggggaaatcccctttataaaatcatcagatctcatgagactcattcactatcacgagaacagcatgggaaagatccgccccccgtggttaaattacttcccactggatccctcccacaataggtgggaattgtgggagctacaattcaagatgagatttgggtggggacactaccaaaccatatcatgatctattggaaaacaaactatattggcaagccggctcaccacaatatactaaataatgtgttatactaataaaaggaaatctaaatatcatctttaaaaaaggaaaccaacaaccttggggaattatacacccagacaatatagagtactggtggtctttttgttctgtcataagttttggcccaaacggcaacagtcccaaaggcttcacatccttccatctcaggctctgtatcttcttggccagagtcctcctatgaggctgtcttctgctgtccctcagatggcacttccattgggtccactcttctcaaagacctcaggctttgggggtcaccctgatctgcgttattaacttagccatgctccgtttccctagtctataaaactgaagtaataacattcattgattcatgtgtcctttcaacgcatagttgcagagtgctttctgtactgcagatctgtgctgtgcgctgggcatgccatggcctgtgagaaaggaatggttcttgttctcatagcatgcacagcctggtatgggacacagactgttaaacagcaataccagatgagcgtaataaaggctatggtaagtaattaaggcctcagagaagcacttaatcttatccacagcatcagaaacaaatgtgcctgactgagtgagtgctaagctaagatgcaaatggtgaatgggaacttattaaacagacatgaagaagcctgtgtgaagacccagcagcaagaatggtcttggggactggataatagatggggttttagaatagttggggcaaagcctgcaagaggagaatgtcacagaatgcaactggagaccaagggctcaagtcataaaaatcctttaaaatatcccaagagtctggattataccaaagggccatgggaatatgcgatgcttttaagcaaggaagtcacatcatccaatttgtgtcttagatcctttaggtccctgagtgaagaatgaattcaagtgggacagttcgtggcaggtagaccagttagggggctgagaaatctaaataagaggcaatatgggccttgtcctaggttgggttcccttgaaagtagagtgtgaggcacagaattggctggcaggttatttatttgggatgtcattcctggatcccagaatggaaagaatgagattagaaagggagaaaagaaaatcagtaaaagttgctttaatgagctggttgctgctatgggcaactggagctcattcctactgggagccttctaaggaatcacgtagaacagtggttcttgaagtgtggtctctgtaccagcagcctcagcatcacctgggagctcattagaaaggcaaaatattggattccaccccagatgtactgagtcagaatcactggagacaaggtttagcaatgtgtggtttaatcagctcttcaggtgattctgatgccctctaatgtttgagaagcgcaggcacagagcaggcctcataattgccccactggatcggaggaaactgaggcagaggcagagaatttataccctgactcctgtccctcagtgatggacaattgtttttcacatgtcaaggttgcaccagtaaggtgggtaaaggctcatgacttctgagaaggcctgagacagcaaagagagggccgcatccccttagtgcagtgtcctggcaaagtgtgtggaggtggagctgtcctcccagaggtgctgaagccgggtggacagaggggctgtgcccctttcccacataaccagactactcactgtgactggggtgtggcagtggagatgcagagaatttgaggatacattttcaagaaataatcatcagcacctgataaaaagaaatgaaagaagaggatatgaaaggaaattccatttttcttttttgaggaccttaatggatggtgaacaggaacaggtaccattttggaaacttgaattagaggtacctgtgatataagctaatgatggaaggatatggtgctctacacaccaagggaagataaaggcaatcatcgtgatgggagtgggtgaaatagctcaggaggtttgttgagtaagatgtggagaagattgaagacaacaccctgagaagaaggagagggccacagtgggggatcctctctttaataagcaagcaaagtaagaattgtcttgagggcaattctgggaggggtcaaaggatggaactaggagtacgtgaaacccactgagtactcaggaaatgctcactttcattactaagtgactccttgtgggggctcctgattcttttaggacaatttcttaggctgccattttgtagaaaaaaagtatctaggtcgaatattaatagtttctttaaaaaatatctgcactttttaaaaaataaactgctgcttactttaaaaaattgggaactttgttgtccctagggataatggtcattctcatatgcttagagcatatgagaatgatgtcattagttacatgttaaacactgggtcctcattcagacactcccctgccctggaattttaatcttagctggtgatgcagctgtctcaaagtgatgacaacccccaggggaccatatgcctgttgtcttcacattaggctctgggcaggcaaagaaatttgtttagaaacttattactacttttcccaggaatccatcacctctaattttgccaggcagaactcaacccaagcatattcttaaggtgtcagatctgaggggtgtggcctcaggtcttcttgatgtaagtacatggatgttcccagtcttagagttcttattgtaactcacaagttcactttcatgaaagggacctacgtattcactggtacacgataataaatcacttagggattgaatatttacattcatgacagtcttctgtcaaaatttaaaggaaatgtatatgatttggcttattcatgcacttagtaaaatatagcattttcctcaaggtggtctcaagttgcatggtatatcagccaaagaccaaacatctgagctattaattattctctttgctataaaaattaagaagctcacttactgcagaagcttctttcttaggtcttcatgtgactgtaaatcactggggtatctgaagagagaattccaatctatgagcaaagaggtgtacgtgggaaatcccctggctactcctaccagggtcagaaacagttttcaatgatacggggtaattattctactaatttagggaccgtttttatctgtaactaccttatacttaccgtatttctatggttgtttctcatatacacttctttgatgagattttaaggaacatttcgttggattagaaccaaattgaggggaggagtaatggatcaattatgattagacatgcttccagagggaatgcaagagattttctaccctgtccattgatgagcaatttcttgctcttggcagaacttgagccaaatggagcacagaatgtggatggctgcagattttccttccaccctgcagagaataattttggcatggtgtcttcaactttgtcacctgctcttgagttgattggtcacttttactagaaaacttagctctaaataatctctaccatatttcttagagataatttcctcactcagagatagtcattccttattatcttattttaaatatattttcattttcttaaatacattttgtctccgaataccatctacatgaagtaacattgcttatcacttaagcaatatctcagaaacccattggctgtgtaaattatttatttcatttgcaagttgggaactttgctcatcaagaatatgtcaggccgtgcgcagtggctcacgcctgtaatcccagcactttgggaggctgaggctggtggatcacgagatcaggagttcaagaccagcctggccaagatggtaaaaccccatctctattaaaaatacaaaaaaattacctgggcgtgatggcaggcacctgtaatcccagctactcaggaggctgaggcagagaattgcttgaacctgggaggtggaagttgcagtgagcagagaacatgccactgcactccacctaggcaacagagtaagactccatctcaaaaaaaaaaaaaaaagtaaaagctaaacatacctgcatttactaaattaatcaacactcttacagcagttaatatctccacagttctgagaacttttctaatcttaatttatttgatcatcttaacaatccttaaaatgagttccataatcatctccaattttcagataagtaaattgagaccaagagccattttacagtttgcacaaaattgcccaacaggaaatagaaaagctggacaccaagccaatgtgtttaacacttggctttatgctggtagtcattattttctggtgcttcttcatgtgtaaatcattctacagaaagtaaagctagaaaattaaaagcaatattttctccagaaacactgcggtgaattccatctctggctgcttcttgtgtcttgacattttcccttcctcctttgttattttatggccaaagcgatcgtcacgttggctcagatcattgtaacaagcttctaagccccttgctaacttaggccctaaccatcttctcagtctatcatatgtggcagctgagttcctatctacctgtaacacataggctcacatttatgtctcaaaattaagaattctgtatcttgcaaggctgatgagattagccttaccaggaatttctaagtatctactatatggtgtagataattcatctcttctcacatagtttatgactgcctcactgaaagtctaccctgtaatgaatcgctgatctgctgggaaagatacggggattagaatactttcagatgctaccttttctaagagatgtgatacatattaaaatcctaatggcttatctcaaaaaatatgctttctttggggagatatgttttaagtgaaatcatgtttatgttttaggtagggatggttctttacagcacctcacaacattcaccagataagcagtcacttaatatcttgttttttataggcacactagaaaacctttatggtacttcactgcaactactctccacagtccccctttggcccaccgtggtgctgacatctggcataacggactatgtgttctcaccagaattttgggaaaagttcagtcccacattgtattctcgattgcctttacgaggtgcctgttatttctcactttatctcctggtagaggaaaaatcaacatcgaatactttgaccagttcacatccaagatgaatacttatatttgataattactatttgaggcacaaatatatatttgatctacttttttttttttttttttttttttgagatggagtttgactcttgttgcccaggctggagtgcaatggcattatctcagctcactgcaacctccgcttcccgggtccaagcaattctccagcctccgcctcctgagtagctaggattacaggcatgcgccaccacacccagctaattttgtatttttagtagagatggggtttctccgtgttggtcagactggtctcaaactccaggcctcaggtgatctgcttgcctcggactcccaaagtgttgggattacaggcatgagccaccgcgcccagcctgatctgttctttaaatggtgattctgattcaattttccattgagggaatttctgtatatttttgataacacaattaaaagcaaaatattccatccctttgatttagtcaaacttcctccctcgaggccagttttccctagttcaaagggcttttacctgtgacaaaagctcattgatatgaatcagaaaatttttcagcactgaaattactcccttaatttgtcccaaactgccaatagtgtttttattgtcccatgtgtatgaaacagtcttcatattttaatattcattaaaatgattcagtttcttagaatcatacctttactcagtttctggtctagtcttaattactggtgacatttctctcttttcagttcctcccaagtttgtggttcagccacgggaccaggacgggatttatggcaaagcagtcatcctcaattgttctgctgagggttaccctgtacctaccatcgtgtggaaattctctaaaggtatggagttacttgatctacttgttacctgtcaaacatttgctatgttctaaaggattagataagcatttctagatttccagagaagtttcttgcaagtagatacgtatctctgtttccaccaagcctatcattctctcatagacattcctagttgtccacctaggtgtttttattcagacacacaacgtgtctgttgtacataacatgcccttggaaaggccacagagggatggaagtcttttgtgtagattgtttcagcacttaggaagtcctaccttgcccacctgtattacataaccatggtctgcttagagatcactgcacactcgtacatgaagagatgtgagtttaaattgtcagaactactcatagctggaaaactatttccccagtatttagagagatgagtgggtttagaaagttaaagataatatcattgattgttttattccccttattaccttagaatatacagattacacgtcatctccttggcgtgctctttttaaaaacaaacacgcccaatgtcctattgcgattgtctcatgttccctgcttgcacccctaatcatgtttcctcttctaatgcagaacagtagctcctgggttttaggtgacattgtagatattatgcaagtagaaatgtatgacatggaaacgaagagtggaatcatgttagactttggaaaaacaatttctgttcattagggtggcttcttcagaacgcctccttaacggtacttgcaaacatattggaagttctctttcttttctcatttagacacttgaattcagtactatattagttgagggccagatatgtactggtgagatcaaataatcagtcaatcatgacctttttttttttccaataacctaagacctagtatctaggtttaattattgtgaggtatttgtatttgtgttgacttaatcatcatttatactctagatctttcttttttaaaatagcatgttgcattttctcattatggaagcaacaatgaccaaaggaaaaataaatggtacatttgttgcaaccctcctggcatctctcttttgagaaggaaggtaaagaagtggggaaggttgctagacactgtctgattgggaaaatagctaaatttttaaaagtccctgaagcaactcccctgtcacacaccacacaccacatccactgtccatgtgcaaaggacttcttcaaaaataaaatcctgttattcagagtctctgcccccatgactttttatttcctgccgtatttgaagctccattgtgcattattacatggaaacagataaacatcataaatttaatttagtttctatggaagtgcatatttgatattatggacattttccatgacatttgccttcttcaacattatttttaatgcctgtcgttatgcaggtgttctctctctccctgagggtgtttacagttttcactctcataaacactccagcaaatgaacactcctgtatgttaattcaatgcgcatatgtgtaagtgaagtgaaaaggcaccagccatatacaaggctcttactctgtactgcccaagggcacttaggccaccaacagtatgggtgggtaaatgtggcccagcatcctcaccaactagataacattttttttaaatagtctttacaacctgatggttgaaaatgccctctcattttaatttgcatacttagattgttaatgttgtttaacatgttttatcttatgttaacagaccacttctacttctcctttgggaaatttcttattcatgttacttgcacgcttatctctatgtcttatttatttggaagtgtttctacatagattaaataatactttgtctgtcttggatgttactgacattttatcccttcttaccactaacttaaaaattaggttgtaatagtagcttttttgtctttaaatttcatatccaatatcaagtcatcaaagaaaaaaattagaaattgcaattttttaaaaagttaaattccccccaataacatcactcaaagatgatcaaagataactgctgcaaacattttttgtctctagactgtcagtcctgtccccaagcaattgcatacccatagatacacattatacatttttaaaagtttgatgattgttgctggcttataatctttcttcagtcaacaatatactatgtatgtcttgccataacaacaaatatggtgcttaatatgacttttttttttctggagacagagtcttgctctgtcgcccaggctggagtgcagtggtgcgatctcagctcactgcaacctccgcctcctgggttcaagcaattcttctgcctcagcctcccaagtagtagctgggattacaggtgtacaccaccaagcctggctaatttttttgtatttttagtagagatgaggtttcaccatgttggccaggctggccttgaactccgtgactttttaatgtctgtgtaatgtttattgtagtacatcaataattacgtttatctaattactttagttaagattgagttcagccacttaaattcacaagggtttatttttctcataagaggactctggatgtcgacagctcaggactagtttgttggcttggctaagtcatcaggcacccaaactccttatgtgttaggaagagttctgcctctcctagcagcattcttcatcctcaaacgatggccaccaagctatagtgtcaacttcctttcacatttccctgtaggaggaagagcaaagggagatggctgcccctcccacacgactcacctccctttaaggtcctttccagaagtgcatcacagatcaattttgccagcatctctctggatcgctggccgggtcgcccctggctataaagggtccgtaagccatcatggacataatgtgtgttattttcctaagtcagagggggtgttggatacctggcaactggatatctccaacactattgttgaatgtcatatttttggtttttgccagtttttcttttagaaaaatatcgtaatgggccaagtgcagtggctcacacctgtaatcccagcactttgggaggccaaggcaggcggatcatgaggtcaggagatcaagaccatcctggctaacacggtgaaaccccgtctctactaaaaatgcaaaaaaattagccacgcgtggtggcggccacctgtagtcccagctactcaggaggctaagaatggcatgaacccgggaggcggagcttacagtgagctgagatcacgccactgcactccagcctgtgcaacagagcgagactccatctcaaaaaaaaaaggaaaagaaagatatcataatgacttctaatgacttctgtcacatttatctttgtatatgtgttcatttatccctggggataaatttctataagtagagttgctggctcaaggagtaaataatttttataactttcaatatgtattgacaatttgccagcattttattcatttacacaactcacctcagtttgcagtagtgtctgtctcttataaccaaaataatactggatattaggctttttttttttgacattttccaatctgatagagaaatatggtatattgttattttaattatgcaagcagtaaatctatttcttaagaacaatttagccttgcttatggaacatgttttctttcaatgaaatgatcactaagagctgaagtgcagctccctcataaatgacaaaactgtataaacaaaacagattcagcttgtttccttgagagatgcaacagtttaattcaggggaggcagaattccagggtaaatcactgcagtttaaaggtagctattgtagaaatgaaacaatctttgctacaaaaaaaaaaaaaaaaaaaaagtcattacatttttgaccttgggtctagatacacaaagtctgagacattcagttctcttttttgatttatttatttacatgaacaaatgaggcctcttgcctaaaagagatttaaaaaaaaaaaatcagggcttcattctgaggtgggtctcacctgtactcccagaagtccacagcttaatgccattctcttgcatgtatgtcacttatactggagggaaaatagttcagggccatctccttgttacctgctgagaagcgaagagggactgcaaatgcgagagaatagatgatgcatcagcctggggcctggcctgggcctcctttgctctctctggctgtccatagagtctctgaccttcagggaaacttggttgtgggaatgtccaaaaagaagagtcagagcatgcctggggggtgacgctggaggacaatggggagtagtttgcatttaaaatagcattgtcaaaataccccaggagtagggaaagtctgaggaaagacttaaagacagatgagtcctgtgctcctgtcctccgagggagaccggaaggtgaggggccagctagttcccaagagttgggggtagggggcgaggccgggaggttgatgcctggaatgatccagaaacaccaaggaggacattacagctgtggcagagttagtgaaaggaagtcctgggagaggagactcctgcactgggtccccatcagtcattgtaaggacctggctctgcccaagtggggagtgggtatggtgagcaatgagagtggtgatggtgatgcggtctcttcagctgctgctgtgctgaagccagaagctaggaggctagctgggtaattggagagagatggtgtgatctgcctcatgctttaaaaggatcacactggcatgctgttttgaaagcagactgtgtgaaggacaggaatttcagccggagagctgttctaaggccttggccgggatgtggccggaaccagggtgactgcagtggaggagggacaaatggattctgaatgtctttgagtgatggacatactatgggtgtgacaaaaggggagaaccccaggcagtgaggatagtggaagtgccggtgacagacaggacgactccaggagggcagacctgtggctggggtaagatcagggttttgggctcctctctatgcagatacagctgtcaatttccaatataagcaatgataaattttctaaatatcctagattttgatgaatattttctgcattgtcagagcttagaccctctatgttctgttctgcagccatatgcccaacttttgcaattgccagttctgtgttagattgattttgtgctcagtatgagttatttggacatagtgaagaatattccaacctctttctggtttgcaatggtttgttccttgcctttttacacccaaaggacagatattggcggctcacactgtctccttggagggagcacagactgcctgatttccctgtagaaggaacttaatctttttggttctgtgcaccaaagagctgactttgaagtctggtagtttattttctttttttatttttgtgatggagtctcgctctgttgcccaggctggagtgcagtggcacgatcttggctcgctgcaacctccacctcccgggttcaagagattcttctgcctcagcctcccaagcagctgggactatagccatgcactaccatgcccagctaatttttgtattttgggtagagatggggtttcaccatattggccaggctggtcttgaactcctgacctcgtgatccacccaactcggtctcccaaagtgctgggattacagacgtgagccaccgcacctgccctgaagtctggtaaatttttagtctataatttggtgttttccatttggggtcaattttcccatagatgtggtgcatctatttaatatgtagattcaggttattttaaaaaatatttttcccatgaattgtatctctaagtgttctcttccctgctttaattttcttcttcagggtctctgattgtggttccataggattgccacctagtctctgtagctgtcattttctctctggttttttaactcattgatttccattttaatttgttcgatatttttccatttctgttctccatgtcttttccccagcaaggtctgttcttctttgtgccaactccggttctgccttcactgctgtgagtttatattttttctccttctttctctccagctctgccagctcacagttcacccttcttcagccatggctttatagacaagtgactgttttattcacagtcttcatctaagtcgtaatacctggtttcttgttctgtttttttcttctattttgcttattgtatctttgctaggtcttggtttcctttcgaatacagcagccccaagacccccaggggatgactgaaccttggggagcaccaaaccctacatatactatgcgctttcctacacatgcatacccctgataaagtttaatttataaatcaggcacagtaagagattgacaaaaattatgagtactagaataaaattattattacaatgtactgtaataaaagctatgtgaatgtgctgtctctgtctctctcaacatatcttatgtgtctatactcccctattttaagactgtaattgacctcaggtagcttaaaccatggaaagtgaaaatgtggatgagggggaactactgtacttacatttgaagaaaatccatgtccccagaaaaagattgttgtgtacaaatgcctgattcctcagctaaccctacttctaaaattctaagccacatcaggcctggggaagtgccacccacacccacctatgcacactgttttcactgatggaggcttggctctcacctgtgacccactctgctgggacttctgaagttcacagcggtggccctgattccctcatcttcctgcatgctcttctgctcaattaccctgttggttgcccatttacccattctgtagctggaagtttagctattttctaatttcataggaaatagaggttacatttttctaggcttctctctcccatttgctttcatgttgttcccaggaagagaagaagtgctggtttatgcctccatcttcaaatatgaaattctattgtttatatacaaagggtcattaaatttggacttgattttagtaaaataaataaagtaggaatctaggaggaggagtagaaatcatcagttaggagactgggctataagttcaaaccccagccataatacaaccctgtctggttgggtgactgcatgtaaattacctaccccatatgaaccacagcatccttgcagctgaaacagataaaataaggggataaatgtgatgatttagtaagatgactcatagaaagcatttattatggcttctggcacatagccattagtcagtatgtattagctattattaatatcattattgccattatcatgaacttacatggttagccatttgtcctaaaaccatttattgaagagcccaaactttttcatttgcgataccttattgtctaaggggaaaatgtgaatactggagtctgtgtttcagccttctctctgttacactcaattgcctgttcagcaccatacgtattagaagtttatctccttctattttaatgtctgttttgacaatactccccttgtgacttttatttttcaaaaatgtccttgctttttctgcatggatttttgtttgtttgttccttctagatgcatattaagataactttatcaagtttccaaaaaatctggaaaatttggaggatcataaatttaaagcttaacgtgaagaatgctgatgtcattagaatattgagtcttcccagccaataccatggatagtcctttcatgtatccaagtttttcttttatgaacattaataattttattgcattctttccatttgtcagtggtagtgaatttttataagctacggcatctggttttcttttgtcctccttggttttctgggcggaaaggggtcaagagctgtctacagccaatctttgttgagcttgtccttatgtagctgtccacatctctttcttctcccagcaagggtaatgctgttcttaatttagaggagtttctattttccccactctgtagctcatactaagggctgcaatggtgtgtgactctatttcttcctgtctctcttgagattgtatttctccctgccccttttcctgtgtcctttctgctcattgtagtttccccaattccatatttccctggaggctccagagaatccaccattatttggtgcacacacaggtttgctttagctcctccttctcctactgcacccagacaagctgctggaggctgtcacttctgcactcaccacgcacagtcccccagagggcctggctgtcccttaccactagggccctaaaagcaccctcttctgctcagtgtcagcccacctggagaaatcctcccctgtggttatagactcatcacagggggcaacaggaacttgattcttttgttgagagattcatagaaataaaactaggcactccagacagttaactaaacgtttccatgcaagatggaggggaaaacacatgctgtgctcaatactggccaaactgctcaggtgaccctctctggagtcccctcctactttaggggcatgccctggaaaggctcaccttgatcctgcccacaacttccctcccaatgtccaggggacatccctggaaccttctgtagtcctcatggcctatgtctcagaagaccatgagaaatatgagggaaaggacaagcctaagtccctcaagcaggttaattctagagcagattttctgccaacaccagtttcagacctctctggtgagatgaccaagtcagtcccttcctcagcagtcaagagagggctcacactgcagatcacctgttaatcacactgtgatcacactgcacatcatactgcagatcacactgcagaagaccctgcagatcacactgtggatcacactgtggatcatgctgcagatcatgctgcagaccaccttgagatcacactgtggatcataccgtggatgacattgcagatcacctgcagatcacactgcagatcacactgtgatcacactgcagatcacaccgcagatacctgcagatcatactgcagatcacactgtggatcacactgcaatcacactgcagatcacaccatggatcacactgcagatcacaacgtggatcatactgcagatcatgcttcagatccacctgtggatcacactgcagatcacaccttggatcacactgcagatacctgcagatcatactgcagatcacaccatggatcacactgcagatacctgcagatcatactgcagatcacgcttcagatccacctgtggatcacactgcagatcacaccatggatcacactgtggatcacactgcagatgacactgcagatcacactgaggatcacctgtggatcacactgctgaacacactgcaggttgtacattcaaaagataagtctggaaagaagcaaattatcaagagacagaaatttgcttaaataaaattctcttttgtttttcctctgggaaagcagggggtttatattaaaatagctcaatagggagcacgttcatagggcccagttgggatgatactgagttttcaggtcctccaaggcttctccccaagttctggtccctttgtcctgctctgtatgcccttgcatgtttcactctgcgccagcctcgtgcctgagtgcccccaggttcagtgtccaaggcatttcgtctcattctttttttgcccttgctgccactcactctgaccttgaatgccagttccacaggctttgctcagacaagtgtctcttttgcatccctgttctgagaaattgggtctctgcattgtctctgacccttgtcttggtcatctccttgggaccagtggctccaatcctggccctatcttaatcctcttagtgtggatcaccagaataaaacttctgaccacaagcctgacctggtggaggctgctgccctcccactgtcccacccctgcctgtgcatctgcacactattcagtgctctcaccatgcccattcctagactcaccatttgtcttgctctgtgttgtttagagcaccccaagactccacacccatggttttgacctcttccatgtccttcatttcctgaagcagcagtgatcccctgctctgccccagtgcactcctctgatccaggctatcaagtcctggctctcacccagcaccccgatttccaattaggtgataagatgcaaatattgaattaatatggggaaagaattcaaataatccaaaaacgagaagaaggcaacatctctctatggcacacatggtaaaaataaacccaagttcaaagtccgatatggatccctcatgcacaacaaaaggagctctgcttgtgtgttgtgtgttccccaagaagagacaaggggcctcacaaagaaataatgagttcttgaaaacaagttgtaagctgaacagagaaagtgagtgttccatatattgttttattttcttcctttgatggtaggaaaaaccttagcagagcagaaaacctgccttcctctgtgctaccctaatcagcatctcagtggccctgggagctgctgcaggacctctgcagggtcctcacctaaggaagtgtaattaccctgagccttggtggagccaccaggacagtcaaccctggggcccatcttgctcttcctttctttatttttcagcactcctccatctttccccctcatttatttcctgggaaactttctggaagccttcttctaggtgtaggcagtcacactgaagacaaatgtttggggggctcttgctccagggaaacggtggctggagaccttgaatggtagacactgctgcagggctcctcccaggagcaaggcaaagcactggtggaatctgcataattgagtcacctcaaccacttccaatatcacatgaccccttgacgagtgctgaattgtgttcagttcatggatcaattatctgataagtgagtgaagggccaattccctctggctgatttaaaaaaaaaggattcttatgtattagttacataattacgtattagttacagaattagacattgaagtgctagtggactagcaagttgtaacaaatcctgattagacactaatctagaccatgaaatttccattgttgtcattggatagccttcttcaacatagaaatgaaggtattaaggaaagatgactggattgcacagtggacacaattatgtgcacatttacaaaagaagtaacctggacggtgtcacacctggatggtgtggtgtgttatcaagaagggatttaataaagggaattaggggcatgcaaaatcctttgaagcgtggacaaactgcgcggccctttaagcacctgagaagtgtaggaactaagatgcttctcccgtcactgctaacagctgcttctagtgctcaagcagtgatttgtagttctcccacaggcagccataaacctgatgtttggggttgacccatgcatcaatttgctgcttctaaagcaaaataatggcttttccacccttgcacctacaaaattgtttttaagtgcctctcactggtaaaatgtaaaccagaatctagtaacaaagccagggaatgtagttttcaggctttcaagccctgcaatttagggcagagtttagagggaaagtggtagtgctaaagatcaacatacagcatctgacacaaactttcagtgtcataaatattacctgcacagtggtggaagcttctttctcagggattggaaatagctctccagcctggaaccaagccagtggtgtctcaggactatacctctgtccacttcgggattcttctttgtaacagaactcttcagcactccttcactgaataagcattgtatttcagctactaaaccttatttaggtgcaactgctgttgctattcttgctttttctcttatctttccattgcaacctctatctttttacccaatgctttcctgcaatcccccaactattctcagagaggaaaccccccttcctaaagaagaaaaacaaatgcattcttgaggaaaacaccactctctccataaggatgaaagggattgtgtttgattccttggtgaaaagaaagaacagcttaccgcctgaccattgtgcaaaccattggtgaggctaaagagacctcctttccatggtcctgcgactcttcagtcttatttcaccctacaaggggacccctctggatgagctcattgaccaagctctccttgcatgcaggcatttatacccacattcatacaatcttgcttcactttatgtgcacaacaatcctacatcatatgtaaatggattattctccttattcatatatgatgaaattaaggatgcagagaaaataagccacttgctgtaaggcatgggtagtttcagagagcatgagaacctaacccttttgactcttatccaagtgccctctctacagaccagcaaagacttaacagtgaaggaaaaaaattgaaacaattttcttatttgctgctgccttcaaagtgggctcatttggtgacaatctgccgttctttttccactgtccccatactctcagtccctgtgaacacagctatgcatatatttgcaataaataagaaaggtgacccagaattaatataactagcaattcagtatgtgccttacataatgctttaacattttattttcatgtaacggagcattgaaattgtccccacttgacccctgctagccacagaaaattggcagtgttttaattaatgactgctggttaccacattgtatcttctagctaattacctaaagtgcttaccttgtgctaagaagattacaggattttacatattgatgctttgggttaaattttactctttagaataaagatgaatctaaagtagatgactgataaataattctgtcaaaccctggcgaagtctacttccctccaattaaacaaatgctagcccttggaactgtagtcctcatagtagatgaatcagttggcagtgtgttcactattattccatttagtaaccacaattagatcttcagatgcaataacccttcaacttaggttcatttttctgatgaagaaaagatttaatgttttcttaaatgcatttgaaactttatttctatcttcattaggaccttttagtaataaagaaacttacttcagtctagataggaataaacagatcatccttttctgctatttaattgagacgacttagcattgtagttaattttatgttgtgattctttaatataaatgtttcaacaattacaagcatttttctggtgaaaattatttaagaaaaggaaaacaatgtgttgttgacatggatattcatgtaaatttttcaaaccacaccagcatgttatttgattttcagtttcttaaatacagttttatataatttgaaatttttagattacctatcttttttttttttttttttttttttttttttgagacagagtctcgctctttcgcccaggctggactgcagtggcgctgtcttggctcactgcaagctctgcctcccgggttcaggccattctcctgcctcagcctccctagtagctgggactacaggcgcccgctaccacgcccggctaattttttttttgtatttttagtagagacggggtttcaccgtgttagctaggatggtctcgacctcctgacctcgtgatccacccgcctcggcctcccaaagtgctgggattacaggcgtgagccaccgcgcccggcctagattacctatcttatagttatattttttcaatcctatatttggttgagttttcaggttgtgtgtattggactaaatctattctcaatttacagtcaactttgggaacgacattaatagcctttactgattttcaaagtgtgttacaaatttaagcacttaaataaaagttgaaggctttttccttaattttaacttccaataaatctattatcctcacactaatgaacacaatatccacaagaagtaatttgataatttataaaagccaaattctttaaaaatgcagtctaattttataggagaaaaaaatgattatctcaatatatggttaaaaactagctgataatattcaacatcctcttctgattgaagcaacgagaacaaaaaaagagttttgtaaaataattacatagaaacacttccttataacccaaagtgctttggaaaatgaagaaaaagacaaaagctcagtagaaaaatgggtaagggataaatgggctgtttactaaagaacaaatacagatggccaatacattcatgatgctcaaaattatctataaacagaaacaaacaaaaatacaaaaaaaatccgccaaaatgtgcaaattaaaatagtgatgtatagcattgatgcagatttaaaagtttaatagcatacatgtatgaggaaaaaattaaccctcagctagcactgaaggagataacgtttgtacatttttaaggcagtttattgtaaatatggtaatatattttaagatttgaatatgcatcacctttggtccgaaattcttctccctgaattaagcatacagattgcctaccgctatatatatatatttctctccactgatgcactgattgatgagtggagacattcattgcaacgtggtccctattcttgtggaatgggaaagacagacagccatataatcttaaaattattaaataattaaaaagagaatgttagaaagcacaacaatgttgtttgcttactataagccataccaatacatagttcaagaacttcagtgcttctaccatcccataatgaaggttctattattatttccattttacaagttaagaagctgaaatattatgtaacttacctaattttacacgttaggaatctattgctttgtaacaaattaccccaatttagtggcttaagatagtatacatttaatagcttccatttctgtaggtctggaatgcatgtgtggcttagctgagacctctggttcaccatcttcccaacattgcagccaaggggttggctgggatgcagtcatttcaaagcttagctgtgggagggtcttctcccaagctcactcctgtgatggttgataagctttactttctcagactgttgactgaagaccaactcccagttccttcccatgggagcctctccacagagcagctcacaacatggtagctggaattccccagagttaagactgagcgggagggagagagggaagaagaaaaagagatggcagtcatgatctttttagccatagctcctcacccagtatttgtcacagtacaggtgctcagtaattaataaagtccatttgcataaaaacgaaggctacattattttatgtttagaagatattagaaagtccgtaatctctctgaaggtatttacttttttactgtttgaatttttgacaaaaaattcagattccctaatccaaaattctcatgctttaaatcccaataagtaaactagtaaatagctttcattaattatttttcaaaatcaaccactcttatactgatgtatttattttttctcaagcatttgaggccaagaacaatggctcgtgcctattttcccaacactttgggaggctaaggtggaaggatcaattgtggccaagagtttcagacagtctgagcaaccaagcaagaccccatctttacaaaaaatttttaaaggcctagcggggtatggtggtgtctgccggtattatagtcccagctacttgggaggctgaggggggaggattgcttgaacccgggagttcgaggccacagcgagctatgatggtgtcactgccctccaacctgggcaaaagagcaagaccctgtctcaaaaaaaaaaaaaaaaaaggcaccaaaatctgctgtgaactttcatatgaattaaggttttttttttaattattatactttaagttctgggatacatgtgcagaacgtgtaggtttgttacataggtataaatgtgccacggtggtttgctgcacccatcaacctatcatgtaggttttaagccctggatgcattaggtatttgtcctaatgctcttactccccttgcccccaccccctcacaggccccagtatgtgatgttcccttccctgtgtccatgtgttctcattgttcaattcctacttatgagtgagaacatgaggtgtttggttttctgttcctgtgttagtttgctgagaatgatgatttccagtttcatccattttccagtttcatctattttatggctgcatagtattccgtgaagcatgtgtgccacattttcttgatcaagtctatcattgatgggcatttggattggttccaagtctttgctgttgtgaatagtgctgcagtaaacatatgtgtgcatgtgtcttcatagtaaaatgatttataatcccttgggtatatacccagtaatgggattgctgggtcaaatggtatttctagttctagatccttgaggaattgccacactgtcttccacagtggtcaaactaatttacactcccactaacagtgtgaaagccttcctatttctccacatcctctccagcatctgttgtttcctgactttttaatgatcaccattgtgactggcatgagatggtatcacattgtggttttgatttgcatttctctaatgacaagtgatgatgagctttttttcatatgtttcttggccacataaaagtctcatatgaattaagttttaaattatctacattatacaagttgctggtgtaattctgaattttgtacattttgataacttatttccaaggagggagcagatttagggataaaaatggttgtccttttagtctcactttataaaatactcattagctcaagtgaggaaaacatattgaagagataataaaatactgttatgtttttaaatgtttttatccctgactttgaattccttatgaaaagaagaattttaaaaactttttctacttagaatcattttatgaaaattcatattttagatatgtaataaagaactaatgcaaacatgtgagttttgttagtagatgttccctcttctaaatgtacaattatcctacatttacatttctcttaattacctttaaaacagatatcagaaaactatgggccacaattcaaatttggcccacatcctgtttttgtttttgtaaataagttttttagactatcttatttcctcataatgatcaccaacatttatcactatatgctaggacaaagatcaattcttctcagattcagtatttttgaagactcctcctcctcctcttcctcctcctcctccttctcttcctcctcttccacttgttttagagacaagatctcactgtcacccaggctagagtacagtggagctcactgtaacctcaaacccacctcagcctcccagagcattgggagtagctaagactacaggcatgacccaacatgtccagctaatttttaaaattttatagaaatgagggctcactctgtgactctggctagtctcaaactcctggtctcaagtcttgcccccaccctggtctccgagagtgctgggattacaggtgtgagctgtcatggcctgccaataagttgttatgaaacacaatcatgctattttgtttctgtattttctatggctactttcatgactcagtggcagagatgagtatttgtgacaaagactgtatgacctgctaaatttaaaatatttactctctggcctttacagaaagattaccaacctctttctgaaaatgttaagcatttttattcatgaacatggtataactctctaattatttaggtcttatttagttattctcaacaacttttacaattttcagtgggctggtcttgcacatattttgttaaatttattctaaatattttatggttttttgccaatatattttctttttaatttttattcccaattggttgttactattatacataaataaaattgacattgatttttgtatattgatgttgtatcccatgactttgctaaactcattttatagttatagcaacttttttgtttactcttttcaattatctatgtagaaaatcatgttatctgtcagtaaatacagttatattcttatcaatctacattcgtgtacttttattttcttcttattatttttctttttttttttttttgagacgaagtctcactctgtcgcccaggctggagtgcagcgccgtgatctcagctcattgcatcctctgcctcccaggttcaagcagttctctgcctcagcctctcaagtagctgggattagcaggagaatcacttgaacccaggaggcggaagttgcagtgagccgaaatcgtgccactgcactccagcctgggtgagagagcaagactacatctcaaaaaaaaaaaaaaaaaaattcaggttgtcgtatgtcccctctagcagttccattttgatgggaaccacctgttgtggggattctacttgatctcctcattcaatgtgaaaggtccccttaggtaccttatcaatttctctcgtctcttcagtggggctagagacaagttgctgagaaatctaaaccagaaacacgggaaaggaaggcacagccacagtctctgccattgtgagctcgagtgagaccaatacacaagttgtcattagggtatggagacagcaagaggaagtgtctcccattctcctgtcctcagatgcaaagtctgaagtttcctgcttgaggcctgtggagacgtctgacttgttcagctcccgtgtaggttcttgggccaggaagctagcaccttctctctagaacacatctttggcccaaacgttgagcttcctccaggaagatcctcaccccagagctttcccctcaagtccccagatactcaggccagagaagaaaaatgccctgggagagtctttcaaggcctgaatcccattctcccagcccacccaactcctccaggccagaagcaggcagcatggcaggttcatccagtcaccatcttcccagaagtcttctaggaccttcataatctgtttcattatttctaaaatcctttttttttttacccagttgtatataaatccttcatatgaatcataccacattcattataatagcatatcatatctgtgccattccctccttgcatggaagcactctgaggagagaggtgttttaattctgtgctgtcttactgcactaatctgatgtatttatttaaataacattaaatgatattaatggtgtattgtgtgtctagaccggaatataaccaccgttaaagagaaacctgcaatattcctattctctttgtagcctcagacatgtgcagtgagcaaagacttcaaatgccatgtccctggagcactccttgtttacattcatattaagtccctgggaacacaaggaatttatttagcaccatgagagttgtctgcttctgtggttgttctactgtgatttctttgaataatttatcagctacttaacactcatcaaatttggctttttatgtagagaaactatctgtaagttctgttagtttttatctcagagtctgagatactgtcattttaaataaatgcttttctctctaaacaagaattttaatactggaggaaagaaagaaaaacctggtgtatcccgtgactgccttatgggatcagtgtgaagcatctctttatgagtctgtgtgtacttgaactcgttgtcttcccatacttactctcgtttgcatcattgctcgtctttctttttctgtctcaggtgctggggttccccagttccagccaattgccctaaatggccgaatccaagttctcagcaatgggtcgttgctgatcaagcatgtcgtggaggaagacagtggctactacctctgcaaggtcagcaacgatgtgggcgcagacgtcagcaagtccatgtacctcacggttaaaagtaagagagaagaaatgcttcgttttacctagtttaaatacataggtctctgggggcttcctttttcaattgtctccatacatacctgtttaaaagcaacacaaaagaagacccgttggtgtgatatagctgggtttaaagttttgttgttctggaaacatgattgaagaggatggtaaacatccagctaattgttgacagtgtgcccagggccccttgtgtgtggagcatgagccacattcttctcttcctttggttctcacagccattggtatgggctctgggcaacctagcagatgagtaggtctctgcctttaacacccacattgctaccctgttgattttcccgtggaaaaactcaatacatggtctcagatgtgctctttacaaagccttttgtcatgcattttgttatttgcaagctgtcttgtccatggatttccttttaaggatcattttaaaatcaagtgactagcgaacaactacaagacagaaatgtgtaagactaggcttaatgctggcgctgctggcccaatatatagaaaaaggtgcgttataatgaaattattctcatacattggtaactggcaaccaaggaaaggatataaagtgaaccagttttactgagttgtgcttattaacaaaatgatggtgcatctagtttacagtgaatggcttatgcccatttatggaattttccatcgaatgaactgtgatttcttcttgattacaaggctttattcagactcccctcccactttttttttgaggcagaggctcactctgttgcccaggctagagtgcagtggtgccatcaaagctcactacaccctcgaactcctgagctcaagggattctcccacctcagctttcttagtagctaagactaccagtgtatgccactgagcccagctttttttttttttaattttttataaagatgagggtctcactttgttacccaggctggtctcaagctccttccctcaagtgatcctcccctcttggcctcccaaagcactgggattacaggcataagccactatgcctggcccttggatttcctcttttttttaactttaattctgctatggatagtttggaaaagtctctactatatgatttattagaagaatgagatttaaaagtggcattcaggggtgtgtgtatttgtgtgtgtatgatattgaaaggctagctaaacagacaagtatccatcctaactcacgaagaatttattttagttagtccactatttccaacagaacaaaaaaaatccaagtgtttatttattaaagttttatattgtgaaatggattataattatgaaatggggttgttttggaatatattttgcacatactcaatacctagtttttgacttttaaatcgtatgctctggaggaaatgatgtgcaagaatttgataacgaattgtggtactgtttaaatccagagctgaaatggtaatttttaaaagttataaaggaaacctaaaatctgaggagcaatgttgaccagagtcggtccatctttccccaaggaaaggggtgtattttgcagttattttaatagactttaaatgcataagacaattttttagtccataaacacatatctaggacccaatatatataagaccctatgaaggatacaagtacaatcaaccatgggccttaccctcatgagtgacaagcctcatgttttggaaggggagataaccaggaagaagatagaagccactgattacaatgcagggtgaagagtcacatggatcatgtctgtgacattcagaggaggatggaaatgtcagcttgggggaattaaggaaagcttcatggaaaataggcttcaagaatggacgatgcccccatatgtcctctctccagatctcggtactcagtggcagttgtgcagcatcagggaggactaaggagatgaggtggcccctgccctctaggagcttttgctctctggggataattgagtggatatatgtccaattcctgtctggcagaatacacaactggtggaacagagcccagaacaccagggttcatggaagagggtatgatttgcttctgtttgtagaatcagtgaccgtgtggaatgaactgaatgtctgtgtcccttcaaagtccatatgttgaaatcttaccgccagtgtgatgatactagaatctgaggcctttgaaaagtgattgggtcacaaagggggagccctcagggatggaattagtgtccttatcgaagggaccccagagagctctcctgttctctgtttccaccatgcgaggatatacaagaaggtggcaacctggaggaggatgctagaacctgcccctgctggcagccccatctcagacttccagccttagaactgtgaggaatacatttccgttgttgataagccaccaatgtatggcactttgttacagcagccccagttgactaagaaactacggaacgaaaagctgcagcatctgagttcggtcttaaagacacaagggccttcaaaaggcaggactgttgaggctagatagggtattccagggacaggagacagagaagccagatacaagaaactgaaagactccaggcaagagtaactctctgttcgaatgttctacagtacatggaggagatgggagaggagaacatttaaagtgaacacacttcaaagagagatgatagagttggccaaattttagattcttaaactaatacaagctagtcatggacaggtggatttaaataagttaaatgcacctcttcatgactgtttgtattagtttatctctctaggcctagaaaataggaagaactatgccatcttcatagagttatcatgaaaattaaacagggtaacacatgtgaaaacacattgtaagacataagatactctaaataagtattccaatacatacatagagtaaatgattctttggttggaaagaaagagaaaatgtatattgatggcacagtgcataggagcatttccagaaagttattctgaaaaaaaattaaaaggccagaggctaggaaaagggaagaagaaagaggacctccatggcccatggggaggtattttcatccttgtctaatactcgtccaaagctcagccctggagtggtgtctttagcaactctaatggccaatgtcttttgcctaaccctagttgtttaagaacaatcagtaaagtgttttaggatctcaaactgaaaaaaaaaatagatataaaggagagtttactggtctaaataaacacattaagtactctcccctttctgtaagtcattttaaaaaatgggctgcaaatatttctaaattcaataggggagaccttgctgtctaattggatgatgtcaggaaattaagacagctgctcctgcagcaagtctggactcccaggatggcctggtgctggctgtaaacataatttaaagacccaaactctccggataggacctgcttctgggggctcactgtgagatcctgcgaaccctgcacagagggtttctcctatatgggaaattttcttactgctttcaagaaacatcactccaaaaataaagcattttaacaataaacacccaccacatacacacacatctttttgttgttgttattgaatcaagcataaggaagccacaggcaaagaagaaagccagcaagcatgtatggaattgtcatggaaagcaatcaatgggatggaaggttactgcatgcaaatctttccagctctgttggggttcctgtctgtgagtctacactgtcatcacaattctggtttatgttttacccaaaataattatcatgtgagataacgattaggaggcttggcagaaaaggcagagggagtaggctctgcttgcaatcaaatttggcctctggtgatgacatcctgccctatgctccaggccgatcgggggctacagaagctatgccacttatgtgccccttcccccaaccaggaactgtttgaggcccagggaatgactttatgttaaaaaaaaaaaaaatagctctgtcaatcgaggaaaataatgagacaagtctcaatcattttaggatatttatttgccaaagttgaggatgctcccaggagacaggtctattcctttctccgaaggtgattttgagggctccaaatttaaaggggaaaggatgagatattgagaagcacacagctttcacataaacaaaaggggcagaggaaaactgtggggaatgtgcattttacataccacagacaaaatggagaggggaacgttcagttatacatttgtgtctggtgggcagagcgactgcacctgtaaagataggctatcaagttgcattgccatggggaagctttaacagctcaccaggaatttccttgtgggcaaaatatgagggaagcgtgtagcttttcatcttgtagccatcttgtttaggaaccaaaaggtggaggcagatttgcgtgacccagttcccagcttgacttttctctttggctaaacgaatttggggtcccaaaatttaatttcctttcacagctccaaaacccactgaatctcttaaatggatagccatccctaaggtttgtctcagatgcccaaattacatcctccccgctcccaactttctgccactggctgatctgaagcctcgtgtttccgggaacactggtttcagcgtgaacctgtggcccacagtgaacaagccgctctgcttttgtgagctgctctgcataggtcctttctgatccctgcatgcaggacaaaagagcaccgcttatcaaacaggaacaggcgcttccctggagagtcagttactcttggaatctagtgaacccccaagctcccaaagttagcccgtgggctctagtccagcctatgtaatgtggtctccctcctccatgctgaatccaggaaggtctgtgggtcgctgtgcccatcagatttctgtactgtcagaatgcaagtgcacacatgtgcatgcaccaactcactcagctctgacctgaccgtctgcagggtcttggctatttctggacagatctccatgttatgatttgacctcaggccactctcaagccctgccattgccagggcagatatgttgggcctgacatataataacccatctccttttctgttgaaaacatgtgtatctatgcctggataatccatagtcaacctcctttactttctgccctcacccactgccaccagtacccacaaatctttatcctaacccctaattagctaaatggaaatctccagtcccggtagcattgctctgtgatacttcttggaggaggaagtagcccagccccaagctgcccccaagcggcccccaagctgccccccatggtgaagctttggccaccttgaattaaccccacatgtttcccaggctctttatgatcactcagtctgctgagccaatcacctcccaccaagcccctcttccaacactggaattaaaattgagcatgagatttgggtaggaacacagatccaaaccatatcaatcatcatttctgaattatagtttaagtccttcccaaacatgacaaattagtgcctgaaatagaatatgaggtgtcccaggtttgtgaacacccagcttatgcactttcctaaattcagtcaccagcacccccagcagtcctcccccaacaatttatcctgcacatatgcaacactcagatccctcctgcttcactctcaagtccagttgccagatacgtctgcaactttgctgggagtttttccaaggaaggagtctcccgcagaagcttcagagggactgcagctgtgccagcactttgattttgcacttctggtccccagaattgtttaagcataaatttctggaggcagaagcagagaatgggaagaatccagggaacgtaagtgtgctggaggggacattgcttagtgaaggaaacccctcagcagctgccacgcccttggtagggcatcctgagctccacccaaacatatgcatttcccttcctaagtcagcctgaagttccaccagctaaagattctctggggtaaaaaaggaatttgtaaaacaggagggtccatatagcagatgcaatttgatccctgctccagtttcaatttccctcctttctctgtgctaaaaattgaattatttcccgtccaccccctagatttgtatgttgaatttgtaacctccagtaccttatatgaccatatttggaaatagcgtacttgcacattgcaggtataattagtgaagatgaggctctactgaagtaggccgccggatccctaatccaatatgactggtgtccttattaaaaggggacaatctgggtgcagacacagatggaaaacatagctgggcaaagacagagattggagttatgctgccacaggccaagagacactgggcaaggcaaggaaggggtctcctgtagaaacttcagagggactccagccctgccagaactttcattttggacttatggcccccagaaagatgtgagaataaattgctgttgtttaagcaccccagtttgtggaactttgttacagcagccccgggacaccatacactcagtgacaacagaactcttttgcggtcttgtgttggagggaagcccaccacaggccagatcccctgcctaagcagaagagtccgaatccatcaaagccactgggtgtgagccctggccgggacccatcaaacgcagcagctccctttgattgaaggatgggcagacaaccagaatttgcacaatgaaacgtaaaaacaattcttttgaggagtttctggagaagatttccgtattcttaatacgggactctgcaaaagaggtttatcccatttaattcttgaccccatgatgtctggcagtacatgagatcacctgggactttattgcctttgctgtctaggccaatgtgggtcagggtttttgcatttgcagctggaggcatccaaactaattagctaaggagagagcagcatctccaattcatggagtgcgattcagccacagtgttcccctcggtaatcctgctgaaataaatggctctgggggaatgaggagttagatctggattgagaagctatagggatttgcagtgcatgctttgggctggggcagaacagctccgtgggaggatagctgaaggtggatggcagcactcggacctgggcacatatggtggcttacagcagggagctcagtacctggtgagggaggttctcctgcctcagcttcccgagtagctgggattattatagatgcccatcactacacctggcttatttttatattttttcagtatagatggggtttcaccatgttggccaagctggtctcaaactcctgacctcagttgatctgcctgccttggcctcccaaagtgctggaattacaggcatgagccaccacagcctttcgaaaaattactggggccagtaaaaatcttatgtttccactccactgttctcctcctcctcctcttcatccttctgttttgaggcacccttctaccaagcaactaaaatgttattattttttttaactttggggtaattgcgcctatttcaatgtttttcagttgatttaaggtccttctgttccatggccttcccctgtggccagtggcactgatgttctgaaccctcaatcagccattaccttccacactggcatctgctgagaagtctgagtgccatatggtccttgactgtggggtcactgcttagttcccttggaatctcctcctgtcttctggctgcccctgaccagacccacccatttgcccatcagcagggttcactgaatgctccctagtgtcaagaattgttctacatcctgcgtgctctgaataagaccaagtattagttcaccgtcatgcagcacaaattcccttgagaaagacatggagatgggtatataacataatgcctggcagaggatacagtgatgtaagaaagcaaggtgtgcatacgtcttggagaaagcattccaggcaaatgaattagcaagggcaaaggctgaagggagaaattggttacatctgtggagcagcagggaccctgtttgctggaatgtatatatgtgtgtgtatttgtatatacttgtgtatatacgcatgcctatgtttgtatatatacacatacagtatacatagacccacacaatccagatttttctttctttttttgaggtggagtttctctcttgtttcccaggctagagtgcaatggcacgatctcagctcactacaacctccacctcctgggttcaagtgattctcctgcctcagcctcccaagtagctggacttacaggcacctgccaccatgcccgtctaagttttatattttagtagagatggggtttcagcatgttggccaggctggtctcaaactcctgacctcaagtgatctgcctgcctcagcctcccaaaatgttgggattacaggtgtaagccaccacacccggcccataatccagattttatgttatatagttatgtgctgcataacaacattttggtcagtgatggaccacatctatgacagtagcccttaagatggagctataatggttaacatacatctaatatatgtgataatggacaacatcctaacattgtaacttaatgcatgactcacttgtttgtggtgatgcttacataacaaacctactgccctgccagtgtacgaaagcagagcacacattatgtacactatgtaatacttgtgataataataaatgactattcatggtttatgtatttactaattgttcataattactttagactactccttctacttataaaaaaaaaaaaagttaactgtaaaacagctcaggcaggtccttcaggaggtgtccagatgacctgttacttgttttttcattttttaattttttctatttcaatagctttaggggtacaagtgactttgatgacatagatgaattgtttagtgataaagtctaggattttaatgcacctatcatctgagtagtgtacattgtactcaatatatagttttctatccctcacctccctcccaccctccccacttctgagtctcccgagtccgttatagcactctgtatgcctttgtgtgcccaaagcttagctcctacttataaatgagaacatgcattatttgctttttcaattcctgaattacttcacttagaataatggcctctagttccatctaagttgctgcaaaagacattatttcattatttttatggcttagtagtacttcacgatgtgtgtgggggtgtgtgtgtgtgtatatatatatatatatatatatgcatgtgaaaatttcaagatgatatatatctaacatatatatatacacacaagatatacaagattaatctatatataacatctttatatatataaaatttcaagattatatatatatatatatatatatatatatatatataaaacatctttgtccattcatcagttaatggacacttaggttgattccatatctttgcaattgtgaattgtgctgtgataaacatagacatgcaggtgtcttttgatatagtgacttcttttcctttggatagatacccagtagtgcgattgctggattaaatggtagatctacttttagttatttgagaaacctccatactgttttctgtagagattgtgctaatttacattcccaccagcagtgtgtaagtgttcctttttcaatacatccatgccaacatctattgtttgttaactttttaataatggccattctggctaggggaaggtcgtatctcattgtggttttaattggcatttccctaatagttagtgatgttgagcagttttttcacacgtttttggccatttgtatatcttcttttgagaaatatccattcaggtcctttgcccactttttaatgggattatctgttttttcttgctgatttctttgagtttgtagattgcggatattagtactttgtcggatgcataattttcaaatatttacttccattctgtaggttgtctgtttactttgatgattatttattttgctgtgcagaagctttttcattaggtcccatgtatttacttttgcttttgttgcgtttgcttttggggtcctagacataattctttgcccaggccaatgtccaaaagagtttttcctagggattcttctagaatttttatggtttcaggttttatatttaagtctttaatccaccttgagttaatttttgtatctggtgagagataggaatccagtttcgctcttatatatgtggctatttgattttcccagcaccgtttattgaataagttgtattctccttaaattgtgtgtctaatccattatgtttttatatgctttgtcaaagatcagtcagttgtaagtatttggctttatttctgagttctccatcatgttccatttgtctatgcatctacttttatatcattacaatggtgttttaattactatagccttgtagtatcatttgaagttgggtaatgtgattctaagaataaatctttttgcttcggatttctttggctattctagctcttttttggttccctatgaattttatgtttttttttttattttgtgaaaaacgatgttggtattttgataggaattgcattgaatctgtagattactgagcagtatggtcatttccacaataccgattctttcaatctatgaacatgggatgtttttccatttgtttgtcatctatgatttctttcagcagtgttttgtagttctcctttagagatcttttcacctccttggtagagtatatttattaagtgttttaaaaataaagtgttttattttctttgtagctattaaaggggttgagttcttttttttttcttttttttttgagacggaattttgctctgtcccccacactggagtgaatgaagtggtacgatttcggctcactgcaacctctgccacctggttcaggcggttctcctgcctcagcttcccgagtagctgggattatagatgcctgtcactacacctggctaatttttatattttttttcagtataaatggggtttcaccatgttggccaagctggtctcaaactcctgacctcagttgatctgcctgccttggcctcccaaagtcaggcgtgagccaccatgcccagcctgagatcgtgtttgattctcagcttggtcattgttggtatatagcagtgctactgatttgtgtatattgatattgtaacctaagactttactgaattcatttatcagatgtatgagtcttttggaggagtctttagggttttctaacagaggtagttttacttccttttttcctatttggaggcccttgatttctttctctttcctgatttctctggctaggactgccagtattatgatgaatggaagtggggaaagtgggcatcgttgtcttgcttcagttgaatgctttcagcttttccccattcaattcagtatgatgtgggctctgggtttgttatatatggcttttcttattttgaggtatgttccttctgtgcctagtgtgttgagagtttttatcataaagggatattagattttatcaaatgttttttctgcctctattgagatgatcatatggtttttgtttttaattatgtttatgtgatgaatcacattttttgacttgcgtatgtggagccatccctgcatctttagaattatcatggtgaattatttttttgatgtgctattggattcgatttgctattggatttggtttgctagtattgtgttgagaatttttgcatctgtattcatcaggaatattggtctgtagttttcctattttgttatgtcctctcctggctttggtatgaggatactggcttcatagaataagttaggcaggattccctccttctctgtcttttggaataatttcagaaggattggtaccaattcttttttgaatgtctggtagaatttaggtgtgaatccaactggccctgggctttgttttgttggcattttttttttattgctgattcaatatcactgcttgttattagtctcatcaggatttctatttattcctgatttaagctatggggttgtatgtttccaggaacttatttatttcctctagattttctagtttgtgtccagagtggtgttcatagtagtctcaaatgatcttttgcatttctgtggtgtcagttgtgatgtctccattttcatttccaattgaacttatctgaatcttctttcttttcttggttaatctagctagtggtctatcaattttatttatcttttcaaataacctccttgttgtttcattgatcttttataatttttttgtttcaatttgatttagttctgctctgatctttgttatttcttttcttctgctagctttgggtttggtttgttcttgtttcattccttgaaatgtgatgttaggttgtcaacttctgatctttcagacttttaatgtaggcatttagtgctgtaaactttcctcttagcaatgcttttgctgtatcccagagattttgataacttgtgtcacagttatcattcattttgaaaaaaaatttaaatttccatcttgatttgatggttaaccccaaaatcattcagaggtagattgcttaattttcatgtatttgtatagttttgagggttccttttggaattgatttctggttttattccactgtggtctgagaagatacttgatatgattgaaattttctttgctctgctcacacgtttattcatccaggtaaacctaaacatgattttgtctatttcaaaaataaccattaagtaattatttatagaataatttaatgtgagggacccacctttttaccatattgagtcattatatccagaaatgaaacttctctttattgtctttagttttctggtagattccttaacgaagaggcacagttgtctccattttggacttagacatattttattaatttttaccaaagaattttgaattttgtatggcattttaaaaaggtatcttggctttctcttttatttgtatagcctaagcacacatccttattaatttaatactattggactcttaattatgtttgaatatttttgcaaaattaacagcctcatggtgagatggccaatggcaagaaagctccaaggtgcatgcacattagtttcaacaggagctgcctgattcttttcattgattcaagaaacatttgctgagttcttaccatgtgccaagcacggtattaggcacagtcagccaagcctctgagctgggattcccaaactgctgtccttgtacctcatttctatcactgccctccagccaaagcccatcagtcacatacttgtagggtaccaagttgagtttattcttgtcatgagctaaagcatacaacatggaaacaatgagatgccttcataagagggtgttgggaaggacgtattataaacttgggcttgtgttaggtgatttgggggaaggttcaagtaagtaggacctaactctggagtgacgctgccagaaagtgggagtaattctatgattgggtattgtcttgatttgttttctgttgctataattattacttgagactgggtactttataaagaaaataggcttatttcttacagttctggaggcggggcaagttcaaggtgaagaggctgcacctgtaagggccttaatgctggtgaggactctctgcagaggctttttgctgcataaagcatgacatggtgaggaagctgacctcatctaaatctaattatctcctaaatatcctgcctctcaaataccgtggttagatttcccaccctcttttgggaggtgggcttaaacaacagaaacttatttctcacagttatcgaggctgaaaagtccaggatcaagattctagcaaggtaagttttattctgaggtctcttttcttggcttgtgggtggctgccatctcactgtgcactcacattacttctttatgtacacatggacagaaagaaagaaagaaagcgagagggagagagagagggagggagggaaagagagagagagagaacactcaagttaactctcaggtgccttttcttaaaaggatattgatctaatcagactagaccttctcatgacttcatctcactctaattacctctcaaaagtaattacctccctgtctccagataccattacattggttagggcttcaacatatgaattttggagaggtactaccattaaatccataacattaaatttctatttgtcagggttctccagagtaacaaagccaataagacatatagagagatagtgctatttattagcatacatatttatatctctttatattggtatatatgtatatacttatataagaatgtgtgtgtgtgtgtgtgtgtgtgtgtgtgtgtgtagagagagagagagaataagtttattataaggaattggcccacatgattatggatgctaagaagtcccaggaaagccaatgtgtaattccaatctgaaagccatcaagctctagacccaaggagagccaatgtttcactcgaagtccaaagacaagaaaagaccaaggtcccagctcagccatcaggcaggcagagtttcttcatactcaatctttttgttcttttcaggtcttaaatggatgggatgaggcccatgcacactagaaaaggcaatctgtttgactcagcctaccaattcggctttaatcttgcccagaaacaccctcacagatacatatagaatcatgtttgaccaaatatgtgggcaagatttctcacccccttagcacagttatataattgtggttaagtttcactgtgagtttcagaggggacaaacattcaaaccatagcagatatttaataaatcttgttcataagatgagagaaatgaagccaggctaatgctgttatgggtaaagaagcagtggtcagtcacgttagacaaaagaacagatgtttggtcattgttgtggtttctttgaacaatgctcatgctattgtctatgttcaaacatgataacggaggggtcttcttttgtcttgatccatctcggtcacagagctgttttgtctgatgttagtgttttgtgaaattgtttatcttcaataacagaacaccaaggcccaggtgggagttcccagccagctcctggatgtcgggggcttttttccaatctctagtttcattattatcatgtaatcatttttaatatcattcatcttgaaaaggatgcagaagacaatacatagttttgtttagacttaattaagaagagaagctacacataagtgctttcatcaagggccactagaccagtcttattgcaaactcagctgaaacaagctcctgacctgcaatgggccttgtgaatgggtacatggaaataagctgatggacaggcaaggcttggagatgtttctctgatgatttattctttgtagaatgcaagtgcctggttgtgatgctcacttttctcttgaggactcccaggtgtgaccctctgcagggaccatcctcactcctcatgttaggacatatccaaagacaacagctacggagcagagtcactgatgcacatttgtaaagcaatggcaggtcatggcaagtgtccatgctacagggcagtgacccaccatctgctctttgcagttcagctgtggctgaggcaggaaggcagagacagggctggaggtggtagacttttgaatatactgttttcccacctatttatttcaatttccacacccttaagccaattgattccagaacctcaagttagatgtccactttttgtggctatccgtttggctactgattgtaagacacattacagaggtgtacagtccatgtatacacaggcaagtaaggatcttctcattccaaagatgcttgagcagaaaagagcacctgattttcagctcattctgaacactggaactgtgactttaatcatcagtatgttgtataataaaacctgaaggactacacaggataagcattgttagttaagaatggctgactcggctgggcgcggtggctcacgcctgtaatcccagcactttgggaggccgaggcgggcggatcacaaggtcaggagattgagaccatcctggctaacacagtgaaatcccgtctctactaaaaatacaaaaaactagtactcttgtaactgtacaagagtacaccgaacaaaggagacagggtcatttataacaggtgtggtggcgggcacctgtagtcccagctactcgggaggctgaggcaggagaatagcgtgaacctgggaggcagagcttacagtgagccgagacttcgccactgcactccagcctgggcgacagagcgagactccatctcaaaaaaaaaaaaaaaaaaaaaaaaaaaaaagaatggctgactcaaaactttcattctctctaagaactattcagtaaccagtattcaactgattccagttgtagccttctttctaaggaaatggaggtaacttttaacttctgggcccagatgcatcgcctctttacaggtgtggcctaattctcatctctggttggtgctgtgggatctgctccatactgggaagtccctgtctagcttcttgccccttattacttagcttctgtatttgctcagagtggagtctttattcttaatgagaaggagggaagccatatgcattccagggagatggtataaccagagaaaaggccctatggcaagaggaagcttggtgtgtttcctccatgacactgctggggtaaaaaaaaaaaaagagttcattaaagaggagatcagatccttcgagggaggtgagaactttgcattgcactctggatggatggccaggctcttcatttttcctttttcctagtaggcatattcatatgtgtaagcgttttctcttttaagaaaatgaaatcacagagtatatgttagtatgcatttgctttttaagttgacaatatatcacagttgtctttccagacgttagaaatacttgttcctcagtgccataaagaaatagcacttcaacataaatttaatctcctcagcagtgccatttttactttctgcagaaggggtacacccgccagcagttttgccccaagagtacaccaaacaaaggagacagggtcgtttataacctgaggtgtccactctactgctgtgtctggtttccattggctggaacgggacctcacattctgtgtttgtctcgattggctagcaacttagaactttttaaaagaggtaaagagagaggagaacaaaagaaggaggaagtaacttgtggaatgctgagaaaggtagaaacaccttcaaataaggaagaggaacaggctatgacctaatgcttgtttggaccagtataagcatgccagggcagatatttaagctaaattgtgggagctaagaacataaagtaccttgatttcttcattgcggctagcagacatttaagaatgttagcacaggtctttgaataaatttcgcttctaagagaagttactgtttattcctatttagatggggaggaaagtctttgaagaggaacctctactttactttttacacagataaatacacatagctccattttattgtatttcaggagtagctcatatttcactttatggtttggcatcattttgcaactgttatcttagttggacattcagcttggaaacaatttcatgtgttcctgtcatttgagaataacatttctaggccttggaagtagtaggttctcaaccagtgtttgcagcaggaagaaatgcaagagggaaagagcaggagagctgatgccagacatagaagaagatctccaggaagaagttttggaagacatgcttttaggttttcatcgcttctcctttttgtatatggtactgctgaatgctgctaggaacaatactttctccccggagatgcaggtcagatgccatgttttctgtggctcatttagattgatacagaatgggccattgctagaaaatggaaacaaaacagtcagaaagcacttcacaattctgagtctgtagccattgattgtaaatgtgcaagaggagaaaagagcacttttgcttaaaaccccattgataatgcagcaaggggaaggtacattgctctgtgaaaagaataaggagaaaggggctttctgtagccataaactgcattaacaggcacataataccatgagtgttgtcattgtcatcacaccatggagccacctctgtgctaccttggccatgtattgaagccaggagaaaaaaacaagggtaagtgcatgagcattaaaaaaattaacgtttggaagtcctgagttgtcttttattttctgcgacctctgagaagcccctctttctcatgtgccactgtaaaattatttccacaactgtaaaaattgggattgtagtaatgctaaatgaatccattctgctcattcagtcctgtctcccaaggtaatcactgtaaaaggctaaggatgatgcattatgagagaatagcatagccatgtggagaggcagtgccagggagtgcgtttgccattgtgtgtgtgtgtgtgtgtgtgtgtgtgttcagcaaatacagccagccctttgaatctgcagcttccacactcatagattcaaccatcctcaaataaaaaatattcagggaaaaaaaaacaaaaaaatacaacaataaacataaatacaaatataacacagtacaatacaacaactatttggatagcacttgtattttattaggtttcatatgtagtctagatggcacctaaagtgtgcaggaggatgtgtgtaggttagctgcaaatactaggccagtgcatatgaaaagtcttgaactctctcagagttttgtatcctgtatgaggggttcctggaaccaattccccaaagataccaagaaacaattgtatctttgttttctttcctctcttatcccattatcatataacatatgatacattgatttgctatcatagtatttaagtattgtcaacttcacatcatagtagtaaagttacgggacattaaggagaggcatgaacatcaccaaaggactttgcttttcttttagggacagggtttgtgtgctttcagttgtgctcagggtagtgatattatgtgaagtggaagtataaccttgttattgtctttatttgaagagtaagtatggtgtaagcagacgtgcatggatgccgagttgacaaggtgtggatttgtgatggttaattgtatgtgtcacttttgctaggcatggtactcagatgcttggtcaaaagccagcctagatgtcgctgtgaaggtatttcttagatgtgattaacatttaaatccatagatttttgagtaaagtagattatccttcataatgcgggtgggcttcatcaattaaaggtccttagaaaaacagactgaagtccctggaagaaagaggagatgctgcctccttcggacccaagctgcacatcagttctttcctgggtacagcctgctggctggcccggcaaattttagacttactagcccacacaatttcatggagtggttccttatcataaatctctctgtctctttgtgtgtgtgtgtctgtctgtgtgtgtctctctctctctctgtctctctctctctctctctgtctgtctctctctctcctattggttctgtttctctgggaagccctgactaatgcagattttgatattagtggcctaaaagttcaggaaggattatattcccacacacatgccttgtagcacccacagcctaaatacctaaatacctccctcagcaaaatgacacatattaacgtgtgcatattttaacatgccgtgaacttccatgctgtttacaaaaagttgaaactgcaaattcactctgtaaatgcttcagggtatgctgcattttaatttgggaatacagagttttaaagactcaagtccaaaacatacattggataccttctgtattagttttctcaagttgccattacaaactaccacaaacttagtgacttaaggaaaatacccttttattatccagagttttgcaggttgggcatccagtggcttggctggtttctctgcttcacatatcacaaagccaaagtcagagcgtccgcagcactgtgctcctcttactggaggacctgggagagaattttcttcctggctctttctgactgtgggcagaattctgctccaggtggctgtgagacagacatcgctgcttccctgccagctgtcagctaggggttgtcctgagctcctataagcctcattctattccttgcatataatcacttacatctcagaattagccaagtgtggggtgagtccttctgacacttcagatctctgactctccttctgttctgtttcttttgcttctgtttctgccacaaggcatggactgactcctctgctttcttattctgcatttaaagtcccatgcgatgtctctggacccacccagagaatttaggatcttctccctattttaagatcagttaattagcaaccttcattccatcagcagaatacctttcactgtgtacagtaacatatttatgttccctagattaggccggggaggtctttgaagcaccattattctgcctactgtattgctatgagcaaggactgtaaatgtcctcgcctttaagtcttttatagactcactggggaaaagagccacatacatgtagtagatcatttgtaacattatctcaaaccataacatggggttgcagagcggaacccggcttcatgaatcacaccacaaaaacggagcgggagctgtctgagtcaccactctctggcacagaacacccagcacacagtaacatacacagcaggtactcaatggttaaagggatgaatggatatagaggaaaactgagtaggagacttaaaaaatggagtcgtctcctcaatgggatttaacatcctttatttacctgtttattccataattatatattggaagtctaatctatacaactgccagtgctgggccttagagatgcaattgtgattagaccagggggcctttacccacacggagcttataatttgacattaatcatatcagcagatgaataatctcacagttaaaacatgcaccaaatataatgaaggcacttactagatggcacgtgagagataagggaaagccactctgaggacgctgatttttgagtggaaagctggataaaggaggattgtcttaggctggcttctggcagggatctgtgtgctggaaacctgctggaaagcgcttgggatcaacgccatagggggagtacaggaagttggagaggcacagaaagaagctgggatgcagatgcaagcagggcccagctgatcctgcaaagagctctgaagctgggtggcccttccaaggtggctggggctgggggcctgggctttatacccacccccgtgaaccagtcaccttgattctgtgtgttaagtcataatgtacctcagttttctggaggtgagacctctgttttcaatggttggaaaagctcatgactataagcatcagatgcattcgtattgccaactgtatcattttgtatgcgtcagaaaatcctttcttgcttagaggaatgggggagcataatgaatcagtttaaatttgctcccatcaccaccttccaccgggttctgagcttttacttatttccttatatcatcatagccagtccaacttaaactgtgatattccaccctccccctgcctggagtgtttggtcttttcattcagggtaacttgcctctattgtaatggggtgatatgatatgaggagatcatgcaaaacaaaggctctgtcatttatcttagctgtgactatttatctaatatttactgaccatcaaagccctcactctgtatggaaaacagccttcaatattgtctgacaccaactgggtatcctacaatttagtttgattcaggcactaattacctggagttcgtatcagatcccatgagttaaagggcaagatccctaacaagactgctcttatgtcagacaccagcagtgagtggggtcccaggcttcccacacttctgcctggatagctgcaaattcaagatagcacaccctccttgggtttgataatctgctagaacctcttacagcattcaggaaaatgccatacttaacaattaccattttaccaaaaaggacatgagtgaacagccagatgcacaggtacatgtggcaagatccggaagggtcctgagcacaggagcttccagccttgtggatctgggttgtgccgccctccgggcgtacccatatattcaccaaccaggaagctgtctgagttgcattgctcagagtttttatctaagttttattacggaggcgtgattgattaaatcattggccacatgactgagatctatttctagcccctcttccttccccagaggtcagggggtgaggctgaatgtccccctcctctcatcacatggttggtctttccagaaggccagcccctccttgataatcatctgagggcccaccataagtcacctcattagcataaactcaggtactgcagaagtagaaagggtctgttgtgagtaactgaagacatttctatcactctgaaaactccaagaggttttgaagctctgtcccggaaccaggaacaaagaccagatatattctgcattgtatcatgtaatcaaatacatgcaatttatttggcagggaatttccaggctccctgctatacagtccctaacagagttaggagaatgataaagaggtaaataacatcctccctcccacgatgctccccaatgccttgcagagacttgtgctacagaattccctcactgtggaccaaccatcctaagcccagatagtttctgtagtgtccatggaaacttaggcatcatcgtcctgtgctcacacttcacctgtcttctccctcctggtttatgtcttcctgctcaggtatgtgtaaggcagataaacatgtcacttcccaattaaatagcaaacagaagaatataaattccatttacccactttacaggcactcccaacctctgtgagtgatacgttctcagccccccgccccttacttgggtctagggggacagacaactcgagccttagcactctctagtaacccaggacaattttctctttctccccacttcccccaattttgttttatacgttgggaagttgtggggactggagtaatgattgagagtagcagaacttaagcctttaatgggaatctggttcccatagtcttgaaaaaagtttaaggatgtgatactttgatcctcaatcttgaatcatagaaacaaagtctagggcaatagtaaaaagtccctatcaaaactcacttgcatgtacctggccacccggctggcccttcttagtattttttttctgattataacaattacacaggttcccatatattttaaaaataaaataatagattgaaaggtagaaaaatctctccttatcccaacactcaaaagatggtgatagaaatatttctctttttcctactcaagatctgaaatttatgagggaaacaaaggaggaaaacaacaaaatctcatttgtcaaagataaaattcatgtgagacaatgctgtttatatctatgggcagatactcctcataacttaagctaagaatccagtaggcttacccagacagtcctaggcatcacaggaccccaataccacctctgtaccctaccaaagattagggccacccatgcatactttatggcataaaggtctgattttattatctatgtctttgtaactaattatcacagattttgcagcttaaaatggcatacacttatgttcttacagtttttgtgggtccaggagtccagacatagcttactgaggtcctggcttcaaccatctgaaacaaacagctttctcaatgtcttcctcaaggctgcaatcaaagtagtagccatggcttaggtctcatctgaaggctcaagtggggatctgcttccaagttcatgtaattgttgtcaggagtcaacttgtggcctcacttactctttggctgttggccaagtaaaggtcacccttggtaccttgccatgaggatgtctgcaacatggctgcttgcttgcaagtgtcgtttgtttgttttgttttgttttaaaaaaaagaaagaaaagaaaacatgcaagtggagaaggcaacagagagagttgaaagatggaagttataatatcatgtgagcttatcaaggaaatgatgtcccactatctttgccatatttaagtgattagaagaaagtcacaggacctacctacactcaagaataggagattccacaagggcatgaatatcaggggacaggatcactgggggctatcttggaatctgcccactacagggtgtttcttaggaactgtcagctcccaacaaaaagtacaggaaagggtagagctgtatatgcctagttcccacttccaaactcattatcaagtgtaagtcattccttctatcccaaattaaaacaagggaagactaggaaataggagaagtgttacctcaacaggtctgatctacgtagaaggaaacatcgggaatggtgagaaaaaccctccctcacaaaaaaaaattaatatagtgataaatctccttgtggcctatttttttttctctctgctaatatgtgctgaagcatttttctgtaactagaaacatctgaatgtactgtttaataacttagcctttattctgatctatatgtgttgatttttttctgtgttactcagtattcttctgctatgtgccttttagtggtctgcactctctatcacatggccagcccagtaactgtgtagccagccctcgatggcccatttgactctggtcccttacagcctccaagctgcatcagcagcatagctccctccaccatatttcattgatgacagaagagaaggcaggcagcatgctgcagcacaagggctgtgggagcccagaagtctgcaaaaaggcctccactcccttttcaggatatcaggtgatagagattgagcaaatgctctgtggtgttatcagtgcccagaactggtctgataagcagggaaagacgccaagaaggacagggtcttggagatgcaggtaacatgtgcacccagcccagccatcacccttttcccattcaaatcttgaacttgccaaggtagccctttattgaagagtgcttaattacttccggccacctccatgaacatgaacatgtcagtaatctttcaagtcttctcattagcagtgaggttgggaacgtcagccccgacccagtgcagcacagcagccctcactgagctgtcgctgccacttcaggaaagtgtcttaatgtgagggctgccttttcacagattagtgacggggatgaaaggaggcaacagtgaagccatctggggattcagacattctgggttaattctttgtgagaaaatgtaaaatggccacattttgcactgtattagcaggccatctatcacaactgtttaagtgtggaattttttaaaaaattatgaaagaaccacagaagatgcatcaagctaaattgaaatttttatctgcagcttaccacatagtgtcatatatacactcttactttatgtcttcctgtcttgatacaaccttaaaggaagtagccttcatctccctttattcatatttctaattgaggcccttgacttttttaaaaaacaccaaaattccttaccatgtagaagtttttcagagatgtcgcagaccacatgaagagtgttggggtccccagatgctgcatgaattaagcttgcgacagaggctgtgaatccccaaaccgtcataggtcattctactggcctgaaccctgcaattgccaaacccaggcaaggatacgacattgtctcatgtttaaattccaaggtcatggagtcaaggtcaatgtgagtagaacctgcaaaaacagtacaaagtgaccatgttctcaaggttaaaagtcaagagaaggacctcagcttcctttgaaatggctccacccaggtctcagatgtgtgtcagcttagggtttccttccacttggaatagtgccaggaggccttgatctcagacaaaataccttgaggcctcttccttattaggggctggggctacacacctaactccttcatccttctttggagcttggaggttgttctcttctcttctggctgcaaggaacccctgcattttccccatgaagccatgattacctcaactctgtgtttcctaaagcttaactcccagcataccaggttgcaaagagagctcacttctgaccctgagacctgccacatcacacactccagagagacagctgccttcatgaacaactttctcaaacctgctgaaatgttgctttcatactcgtgtttgttcacccttcacaattcccatgatttgaatatatttctacgctaatgtatcgttttgttttcatgctgctaataaagacatacccgagactgggaagaaaaaaagtttagttggacttatagttccacgtggctgtggaggcctcagaatcatggtgggaggcaaaaggcacttcttacatggcagcggcaagagaaaatgagaaggatgcaaaagcagaaacctctgataaaaccatcagatctcatgagacttatccactaccatgagaacagtatcggggaaactacccctatgattcagattatctcttacctggtccctcccacaacacatgggaattatgggagtacaattcaagatgagatttgggtgggaacacagagccaaaccatatcagctaatatccaacaatactgcaatttgcataactatctgccctgcttcagatgacaaaactgatgttcattggtatgatttggctgtgcccccatccaaatctctactagaattgtatctcctagaatttccatgtgctgtgggagggacccagtgggagataattgaatcatgggggtcagtctttcctgtgctattcgtgtgatggtgaataagtctcatgagatctgatgggtttatcaggggtttctgcttttacttcatcttcatttttctcttgccgccaccatgtaagaagtggctttcgcctcctgccgtgattctgaggcctcctcagccatgtggaactgtaagtccaatccaacctctttttcttcccagtctcaggtatgtcttcatcagcagtgtggaaacagactaatacagtaaattggtacctgtagagtggggcactgctgaaaagatacctgaaaatatggaagcaactttggaactgggtaaccggcagaggttggaacagtttggagggctcagaagaatacagaaaaatgtgggaaagtttggaacttcctagagacttgaatggctttgcccaaaatgctgatagtgatatggacaataacgtcaggctgaggtggtctcagatggaaatgaggaacttgttgggaactggagcaaaggtgacacttataatattttagcaaagagactggcagcattttgcccctgtcctagagatttgtggaactttgaacttgagaaagatggtttagggtatctggtggaagaaatttctaagcagcaaagcattcaaaagatgacttgggtgctgttaaaggcatttcattttataagggaagcagagcataaaagtttggaaaatttgcagcctgacaatgtgatagaaaagaaaatgccatcttctgaggagaaatttgcataagtaacaaggagccaaatgttaattcccaggataatggggaaaatgtctccagggcatgtcagaggtcttcatagcagccgttcttatcacagacctggaggcataggaggaaaaaatggtttcatgggccaacaccagggtgcccatgctgtgtgcagcctagggagttggtgccctgcatcccagccactccagccatgactaaaaggggcgaagggacagctcaggccatggcttcagagggtgcaagccccaagccttggcagcttccatgtggtgttgagcctgtgggtgcacagaagtcaagaattgaggtttgggaatgtcctcctaggtttcaggagatgtatggaaatgcctggatgcccaggcaaaagttcgctgcaggggcatggtcctcatggagaatctctgctagggcagtgtcaaagggaaatgtggggtcagaggccccacacagagtccctactggggcaccacctagtggaactgtgagaagagggctactgtcctccagaccccagaatggtagatccactgacagtttgcatcatgtgcctacaaaagtcacagacattcaacaccagcccatgaaagcagctggaatgaaggttgtaccctggaaagcctcaggggtggaactgcccaagaccatgggaatgcatctgttgcatcagcatgacctggatgcaagacatggagtcaaaggagatcattttggaactttaagatttgactgccctgctggattgtgggctttcatggggcctgtagcccctttgttttggctaatttctcccatttggaatggctatatttccccaatgcctgtacccccattgtatctaggaagtagctaggctttgattgcacaggctcataggcagaagggacttgccttgtctcagatgagactttggactgtgaactttgggttaatactgaaatgagttaagactttgggggactgttgggaaggcatgattgtttttgaaatgtgaggacatgagattttggaggggccaagggtagaatgatatggtttggctgtgcccccccaccaaatctcaacttgaattgtatctcccagaattcccatgtgttgtgggagggtcttagctggaggtaattaaatcatgggggtcagcgtttcacatgctattctcatgatagtgaatacatctcacaatatctgatgggtttatcagggatttgcgcttttgcttcctcttcatttttctcttgctgccaccatgtaagaagtgcctttccctgcgccccatgatgctgagacctccccagccatatggagctataaatccaattcaacctctttttcttcccagcctcaggtatgtctttatcagcagtgtgaaaatggactaatacattcatcaaggttaaagattgacccaaggccacatataggtgaccagctgtctcagtttccctgggactctctcagtctccacattgaaagtcctgcatcctggggactcctcacacagcaggaaattaaaaagctgagatttaaacttgggccctctccaggctatccactgtgggcttctgcctgatttctagcactgttctttacagtagtatggacttcaccttcattgctgttggatacttcttcaccgtgttagtcatgagtagtgcacatctacccaccccaagatcctgctctcctggggcctctttttttttttctttgatatagagtctctctctgttgcccaggctggagtgcagtggcgagatctcagctcagtgcagcctccacctcccaggttccaacagttctcctgcctcagcctcttgagtagctgagactacaggcatgcaccaccacacctagctaatttttttttttttttttttttttttttttttttttttagtacggactgggtttcatcatgttggccaggctggtcttgaacttttgacctcatttgattcacctgccttggcttcccaaagtgctgggattacaggtgtgagccaccatgccagagcctcttttctgcttctttctggacgtataggaagtgagtatgggattcttgcccatgttcactcaggctctctgaacaggcttcttgaggatgttttttaaaatctcctttggcttttatttgagagtctagattcaggcaacacctcatttgatgccatagaatgagtgttcccatgagctgagcagaggaggtggggtttatagagagaaaaggcctgaggaaagcagatacagagaacaaaaatctgatgggtagtttaaaagtgactgtccttaaagggctaaaacagaagggacttccctatcctgccagcttaggtaagcttggccccttctgatccattgctgtggagctcctagtttttaaggaacaggaacctggatcttatcagcaatctaccatccccgttcctcctcctggctagataagtatgaaagcgtcattgatttgtccagtttcagaataatgaaaagcacaaaagcccatggcagaccagaggtgtaatgtccatggctcagggaggctcacacacaatctcttcctcatttgttaattcctggcataaaggaaaaagagagactatgagctccacccacctaagcgagcctccctgccagcaccaaccctgaaagggtgaaaagcagagattcatgtcatcaaaacacttgcaaaattcccctgacttgctgcttgataggcctcccttcagggagaggtgcaggtggaggcatcttcagaagccatcccagccccgggaacctcatgcgaaatcacccagcaagctatgatggactgggctaccctctcagctttccttttttctcatgtgtcagagaggagctagggtaaatcctgaaaacatgaaacagttcccagacacgaggacttgcccttgttaggataacaggcccctttttgtcctaaagaggtcctcccactcagagggatgagcaaactcagggctgctggctgcctctccagaccaaatgcacagctttgatttaaggacttgcaccttaatcacccatcatgtgtcattaccccaacaggcggcagcagccgtaagacacaagtgccaataaattgtgctgaaagttactggagtgattctttgtttattttctctcacagctattctgtgacacttgggctggcattggaacaacatggttgccacatgtaaggaaggggttcaaggtgactgggggaagcaggagcatccctccctccctccctcgattttcttcctgtagattcccagtgcctcgctcagctctctaggaagtcaagcccttggcagtcggcggaaatgagcactgtctcattagctaattgccagtacagattttcaagtacttctgcatgcaaatcataacagcactgagctttcttgctttttaaaactcctctttcacccatcccaccccctggcttctggaggaaaatgaggtctgttacaaactgcacatcagattacttctggggcttttctggctcacgtttcccaccctcgccgccccaacctgagcagagctcctaactacctacctaccactgctgtgagggaccatgaagcagaaggtgctacttagctttggtccagaacaccttcagcagctttcctcgtgcgccccatcccttcaggattcatctcagacctcttagatctgcatcacagaaaacaaaatgcaaaccaggcacagggacttaagaaaatgattgattaaatggagagtagtctactgctgcacaattgtgactttttttttttttttttttccggagacggagtctcattctgtcacccaggctggagtgcagtggcacaatctgggctcactgaaacctccttctcctgggttcaagcgattctcctgcctcagcctcccaagtagttgggattataggtgtccaccaccatgcccagctaatttttgtatttttagtagagatggggtttctccatgttggccagtctggtctcgaactcctgacctcaagtgatccacccgccttggcctcccaaagtgttgggattacaggcgtgaaccactcttcccggtcacaattgtgaattttaataacagtttggctccaatcagtatgataaaagtcataagatattagttcaccgtgacagaatggtccatttccacatggcagtagaccagtttaaaaatggtctcctccttgtgttgtctaaatggggaaggaacaacccatttgggcatcaaggtgcatttattttccacttgtctttagctgtgctttctggggttgacaggactgaaatgaacatcacagatgggaaatgaccccgtcaccgtcagaggtccctccctctgatgcctgtgtggatcactgccccggtagaccgtctccatgacactgggggaaattaatgtgatgacaagcaatggtggctgctggcaagggtgttccattcctctttctttgcattatccttttctcctccagaaatgctcaccgaattcagcaatcacacctgggcattctctgaagtcatggaatacagtgctgaaacaatgtgtggaggagcaaaaaatctaggattttagaaggctgccatgtcacaggcagggctggctttatgggggagcaaacggtgcagtcacacagggccccacactcagaaaaaaccgatgcttttatttatttactgctgtcatcatcttgcaaatcttagtttttgaatgagaagcttcacatttccattttgcactgattatgtctcctgtacaggtaatatgtgtgaaaatattcttgttaaaagtgctcatttctttccttttttcactacctttcactattgaaaaagaaaaagaaatgcatttaagaagacagtctgtgcttttttaccaaagcaaaacaatccaatcaaggaaatgctcaatccatcccctcccacaaagactgaaattttatttttaaaaaaatcactttattatttttttcctttttctttatgattgtacatctgctttaattctaaattgcaaaatgtaacaggagtattgcagggagacctcttctcctgagctttcatgttccaaagtcagtctaaatacatgagaacattcactgtaacagaatcccaggggtggtcccaaagcacagaccagatcactcagctgtgaggtgggagactcagatatcattagctgtaaatagaaaacaggaagcaaagccccagacacaggggagtcttatgttactagaataaaatgggtaataaggggtcaccttcaaggacagaagttgttgagagaaggacctggtcgtggctggaagagctgtacgtgaggtggaaatgagtggtgggaaacagatccagaaaagtcctgtgccagtgaggatagagggttctgctcagtacgcagcaacctgcttcttagctgcttaaacaaagagttgtttatcactcacacaatatgcccactgtggggttgggggcagggggatctgcttattgtgggctcaggatcccagactgacaaaacaagcaccatttcaaagttgcatgtcacagtgtcaataagagtggcctggatggtgccatcataacaaggcttccagcctggaagccacacatggcacttctgctcacaactcattcactgaaggctacacatggtgcttatgctcacagcttatttgctggaagctcatgtagtacttctgctcacagctcattggctggaagacacacatggtaccacatggtacttctgctcacatttcctgggtcagaagacacatatggcacttctgctgacagctcattggttggaagatacacatggcacttctactcacagctcattggctaaagccagtcatatggccccatccaaccacaagggaccaggcagaacaagtttcccaggtgctcagaaggtagatgagcggaaacatgtgacagacagcactcacgatcaccacagagcctaaaacattactttatttacttgattattttgaccgttcatccatttgttcattcattccttcaggagtccatctaacaaagtcattttctttcttttaaaaaaaaaaaaaaaacttttaggttcaggggtacacatgcaggtttcttccataggtaaacacatatcactggggtttgttgtacagattattttatcacccaggtattaagctcagtacccaatggttgtcttttctgctcctttccctcctcccaccctccccactcaagtagaacccagtgtctgttgtttccttctttgtgtttataagttctcatcatttagctcccacttataagtgataacatgtggcatgtggttttctgttcttgcattagtttgctaaagataatggccttcaactccatcgatgtccctacaaaagacgtgatctcattcttttttatggccgcatggtattccatggtgtatatatacggcagtttctttattcaatctgtcattgatgggcatttaggtggattccacatcttttctattcttaatagtgcttcagtgaacatttgcttgcatgtgtctttatggtagaatgatttatattcctctggatacatacccagtaatgggattgctgggttgaatggtagttctgctttttagctttttgaggaatcaccataccatattgctttccacaatgattgaactaatttacactcccaccaacagtgtatgaatgttcagttttctctgcaaccttaccggcacctgttattttttttagactttttaataatagctattctgactggtatgagatggtatatcattgtcgtcttgatttgcatttctctagtgattggtgatattgagcttttttcatatatttgttggctacatgtttgtcttcttttgaaaagcatctgttcatatcctttgcccaatttttaatggggttgtttgtttttcccttgtaaatttgtttacattcctatagatactaaatattagacctttgtcagttgcatagttttcaaatattttctcacattctgtaggttgtctctttactctgttgatagtttcttttgctgtgctgaagctcttcagtttaattagatcctacttgtcaatttttgcttttgttgtgattgcttttagagtctttgtcatgaaatatttgcctgttcctaggtccaggatggtattgcctaggttgtcttccagggcttttacagttttgggttttacatttaaatctttaatccatctggagttgatttttgcgtgtggtgtaaggaaggggtccagtttcaatcttctgcgtacggttagccagttctcccagcaccattaccattagtcattttctgtgggtaagatgtgatagatcttgatagaatcatcaggatctctgcacccaagaagcttagatatggtggggaagctacaaatacctgttacaaggggatcagtggcactcgtcacaaatggcatgcatgcctgtcaggcaatttgttattggaatgtagaggaggaatccaatattttcacacagggcaatcaatggatactgcacaaaggagggggcattggagctatgtagtaaaaactatgcagtttcagtaagcagaggaaaggacgggaatggggaagaaatttctgacattgggaacagcctgaacaaaaacgtgaaggctggaaaatataaggtaatttaggtagaaaaggctcacatgtaattcactgtcatcttgtggaagacacagaatgctattaaaggcagacaaagtgtaatccaagatgtatttgcagaaaagtaatgaatatctatctatctgtatgcaagatacattagaatgggtagagttagaatagaaaaggaggcaaaaaaaaaaaaaaaaaaaaaaaaccagtgaggaagctactgcagtagctagataagaggggatgaaggcctactgaacaaaggtagaatgggaatagaaaggaaaggtggaggtccctgtgggacaggcaggtagatgtggccagccttcacctgcctggcttgaatgttaatcgggagggcttcctcctgtggttgtatagatcggtgctgcccaaagtggggtctggggacccaccgcatctgcattgcagggggcccaggggcagatcttgtgagaaatgcaaattcccctgggttgtaccctggcaatttgtgttccaacaagatctctgggtgttttgtgtgcacatgaaggtctgagcagctatggtagaggcgatgtgcagtgaatctagcctccctatccagtgttcctgccaggacctgatggaagtataactgagatgctcgcctggagaggcccctgcgtatgtaccccctggaatgggcaggtgttagacaagcatggaatacattaaaaagtaaccatcctaaagcattcagggttactgtataaaatatttccagcccggttttctaagtcttttgcatacaacttttgagtgctttgggaactctttctgaggctggattaagtttctactgctgtaacctatgccacttctgagggaagaagccatattgagcctcatctgtccttctaaatcaagtgactttggaagtttcctataaaattctaggcacttatgttcaattactttatcatatcttcccagcatagaaaaacttcctaacccagatgatctcattcaccttatgctggaaaaagcattacattttatttcctctcttataaaattactttctttatctcttgaaaacttagaaggagcctcttctttcatcgttgctttttttgatttcttcttgcacagtaaagtgattaactcaaatttaagaaggcaggtatccaaaaatagcatatacaaaacaggcctacttctctatcttgtgatctaaagcaatgttgttataggttattatttccttttcctaagaaacttgtgatatcaaaattatatttccagcatgtactatcattatttcttctcactttgaaaaaaaaggaaaaactaattttcctgttctttgctagggcccgattcatctttaagtatccgggtatttaaggttttgacatcctgaaacgctgtgcattcttctctgcagaaaagacctttggagcagactttctagagatagggagaaatgatggtaatccatcataatggcctgattccactctggacacataactgttctccatctctgaagccattcctagggaaagtttaaaagatcataagttagacggtgaatgatacacatgatgctcaaattagaatctactttttttcagagtggcattgacgctgcctctcaagcaaagagaagcaggatcatcaccttatatggggacttatatcactgtcagattcagatgagaagggcacagtcattctcacctgaaagtggtaggattctagaaaattacggaaagtcttttaattcctcccgagtactgcactgtcacctctgggagctgtcaccaaaaagaatagttgcatgtcatttaaggccatgtcaagccggtacttagacatggtttaggcatggaaaaggaaagagatgcttctggatggtgttgcttatttaggcaacacacaaattagtcattttcttttcccccagctgctatggcacatgtgagagaagacgcaatgctttccactcagagcgcttggttgtctctgtcttcctccttctgagaggacacctaggccaacatacctgctaggtggagtttagcggtgaacacctctatcccctctcctactcgctgttaggcccagatgtccccaaaagctatccagctctaccacctccctggttttaaaacacagagcctttggctgtggattattgtgtaaagaggagattctcatgagccaaagtctggcccattttcagttcctccacctggagtgccacatcctgagtatgcttgtccaaatatgtccaagggtcgttttcactggagatgagagagctaactaagaatgcagattcccattccactttccagaccacagaatcagacttgggggctggagtcttatatttctattcctggaggcacccagttgattctttggagtattatggtttaaaaaatcctcagattctaccccagggagggccatctttccttcatttcctcccacatatccccatatctgattcaatttttctcccaatcttccacaagctctttggtagacagaaaactatacaccccctccccaggatgtctgtagcccaacccacggaatctgtgaatgtattactttacatgacaaaatgcctttgcagatgtgattaagggaaagatcttgagatggagagatgaccctggattagccaggcaggcccagtgtcatcaccaggatcttcataacagagaggcaagaggccatgaaccaaggaatttaggcagcccttaagagacttggaagacagtgtggctattcctcaaggatctagaaccagaaataccatttgacccagcaatcccattactaggtacatacccaaaggattataagttattctactataaagacacatgcacatgtatgtttattgcagcactgttcacaatagcaaagacttggaaccaacccaaatgcccatcagtaatagacttgataaagaaaatgtggcacatatacaccatggaatactatgcagccataaaaaaggatgagtttatatcctttgcagggacatggatgaagctggaaaccatcattctcagcaaactaacacaagaacagaaaaccaaacaccacgtgttctcactcatcagtgggagctgaacaatgagaacacatggacacagggaggggaacatcacacaccagggcctgtcagagggtgggggcctaggggagggatagcattaggagatatacctaatgtagatgacaggttgatgggtgcagcaaaccaccatggcatgtatatacctatgtaacaaacctgcatgttctccacatgtaccccagaacttaaagtataataataataataaacttctttagtgcctccagaaggaatacagccctgctgacacccttgagttcagacttctcatctccaaaactgtaagagaataaatgtgcattatttcaagagtgagaacttattccagcagccacaggaaatgtctacaacctcctagctttgttgcagtgtttgttcagcaaacctggactgaacagtctccacagaattgttgaagagctagcgctgggatgtgtgatgggcactagacacctacctttcaggagttgacgggagagttggaagacagttgttcagtcattgtcagaagtaataaagctgtccatggcttctcgcactgttctcctcatgtgccttgcctggtgacattggcagcctcctctcagacactagtaagatgaaacatctttgtttcggttatctgagtgtaattaggtagacactgactgcttactgtagatcagtcatggtcccaagctgtttatccatattaactcatttaataattattcctccacaatgatttcagtactattattaacctcattttaaagatgagggaactaatgcctagggctcagttgaccccaggcttctatgaagcagagccaggttgtgagtctgggcagcctgacccctggtgtcactcaaaacccgtcatgtgctctgtgtctgagggctgggtgtttctttcctttgactacagcacctgagatctagctccttaccccatgtatttgtaccctggaagtaacaccctacagaactggaagttctgtacagattttggaaggataaactagcccacatccacggagacccaccagatagagaagagccagaagccctgggctatggtgaccttacaacacggtgagcgtgagccagagctccgatgctcttcagagtgggcactttgagaagcatattttgacttattcattaatcaaatgttgattaagtttcctctttgggccacaccctgggctcagtgcttggcatatcatacaaagcaaggcaacctgctacctatacacagaaagcagtttctagaatgcaggcaagaaacatgggcagctaagttcaaggtttagaattcttctttaatacatgcagctgcatcggcagaaacaagtttatatatttaagtgtgcagatggaagcaagtgtacagaggaaatttatttccaacccacagtgtttccaccctcgatatggtacttgataatacagccacattgtacttcatcacctggggctttggcaacttttgttttagcaaaacaaccttacttttgaataatagaaaaattatccatgcaacagtgagctttttttcttagtcccgttgatgatacaaacatacgtttattgcatctaatgtgacggagctctctcagtaatgatgatggctgttggtgcagtgtaaagggacctgatttttttttttttctgaaaaggaatgcaagcctggtgatgcatcatcattaacttcctagctgcaatgtccttgggagtgaggccaaatttgcttgcagatgaatacagttgaagaagtgtcgaatcaggtgatcctaaggggtggagaagatacattttgaatggaaggcagtgtttggccctcatgggtgtggtgccattttctttcttccgaatggtccttgagaactaaattctgttttccattatttcagctgagctctcttgctgaagggggacagggtgattaaagagctcagaaagagccctacacagaccgaagtagcagctctcttagtcttaattatcggcctttatgtaacattcttcaaattaaacatacagcgaaagaaaataaatgcctccatattttgaaaacctgacagcttcctctcttgtgttttcctacttcataaggcaaaatgtgtttcttgtagaggctagtacagatggttactctggaccatacggttaactgatatgaaaccactgtctgttttgagtctcatctttgtattttatggtcaccatctggccccctgaccatatcccaatgcctcagtagggctgaaggtggataactccattgtaatgtatcactattttcatagaataatataaacatttgctctgctaatttttgtttcttgcatgtagtgtagtagattctttaattacacaggcaaataaattactcctaatactattgcatttctgaagaggctagtttcatacaaacgaggaagagctgatagtgatagtgatttttattaacaaggtctgctatcattgcagacatagggcaactaagtcataatgccctgatatgcttacgaagatctggagctagacggagaccaagaagcctcctgtgacctgcctctaccctgggcttcggggatacatattttactcacattatatttttaggaaaaacaacccaggggaatcattcagggtacatgaagttctatcagcaaaaaaagaaaaaaagaaacatatccacccaaagaattggcaactggatgcatttaaatgtaccaggaaggaatgacagagaccatgtgactgcagaaaagtgagagaagagagaactggatcaagaacatcatagaataggcaaagacagagaggagaagcaggaaacagaatgctgaggctacaatagacaggagttagaatggtcacagaattttcatattccttatttcccaaaagttcaagaaccagccacatcttgactcaacattaccaagtatggaaaagcacgtaatagcttacaatgatcttttcttacaagtgccaggcccagtgggaactgctttgcttatgtaatctcatttatccttgcatcagcctctgaagtggacatgaccatgatttccattttacaggcaaagcaactgtgtggctcagagatgttaaactacttgtccaaagttgcagaactgttctgtaccagagacgagttgacttctgcgctatgtagatcttcacaacttggatggtcttagtagaattactcaaatttaccttgacccaggcaccatgttgtccaaaaagtaattccatgcctcaagagtaaagtgaaaaccaaatcactgttttaagaccgatataatattctgagaatgcagccatgttccgtgctagccagctcttcaggttcactctgtgacaagagctgttgtacattcccagcatgggccttctggttaagaaggactgcaggcatcattagcctgggaactgagatttgcacagactggctgaatgaactgagtcattcaacagccaaagcgaggcaggaaggagtgtgcagaccttacctgaggctgtcagatgttgatacagcctggagccatcttaacatgcaagaactattactgagccatgaaaaagaagtgaattggagtgataccaggtcatgtggaattgctatgagttattgctgcttgggaaagtaaatgccgagttgtgtgtagtagataccgttctgtcaaatgaactataaccaaaaaattgcgtatgtgtgtacatgcgtgtgtatgattgcagagaaaaatatgaaagggcatacaccaggttattaataaagactagagggcagggatgagcatgagggagtgtgtccatgtggaggagaaggacagaaaggtggacataggggcaaaaagtctctaattatatcaacagcatacgtaatgtgtttccacttgtgcaatattacgtgttgtgtgtgtgtgtatcatacataagaacatattgaagcatggtcagtagaaatttgaccaaaattgcctcagactggttggttgaatttttagtgacctttattttcttcatcagatttaagtatatttgtttaggtgagttttttggagcctgcagatgcttttgagtgaagaaaaaaatatatttaaaatattacttggactttaatatggtcatttattaaagttataaatgtaaaaaccctctttttcagttcaacttataaattttgttattctatgtatgtatctcgtaaatttaaacaagtactcttaagggattttaaaaaaaacttttaggttcgggagtacatgtgcaggtttgttatacaggtaaactgtcgtcacgggggtttggtgtacagattacttcatcacccagataataagcataatacccaataggtgttttttctgatcctctccgttatctcacgtgaagagatttttgattaatgtttagacccatttataaacatagttcattttcttctttatatattaaactacatttataaattatacatatttaatttcctttttaaatactccaattatctaacagaactgttctgggcatcttaataacttataaataaataaacaacatgaataacttagtattattatgactccttaaatatcaccctactaggtttaatctcagtaaaagtcctgcttagtatcacctgtctaaattgattacttaattatatatttaaattagaattacaaatatgataaatactaatatgctatatctcataaaaattacagctaaactgcacagatttcttaccataaaaatagtaatgcttggggcttcttctctaaaacatctctgtatggaattctaactctttctggaggtagaagacacttatctactgagaaaacatgaaatgtcaaacagcttgggcagtagctttccgggcacctttagggatattttcctagtggactgaggtttcttaataaccagagaagtcccttgtagagacactgactagcatcttgtttgtaaaattcaatccctgtctgttctaaggtgtatcaaagggctgtatcaaagcttttcctatgggtctatcataccccatgctccgtagattcatacatttattatctgtctcttatggcaactcacaaaagccagccatcccataacaggtggctaagcctcttgatttaactcaacaagtccatttttggcttcttcatatttgaatttttctcttgtttctcctgtcttcagggctgcaactagaaatagaattcaatcttagtgcataatgagtgacgtcatctgcctgtagttacagttctaggtctgccaatgcagaagtagtggaattccattctgtaaacatgcactgtttataaaatccaaaaaaaattactatattcattgtggggtaaacaatgatatttttcaagtagatatatgggaacatttagatgattcctagaatgtaagataaatattaatcacctaaaatgccaagggtggtgtccagaccagtttctcattgtgctgctcaaatatatatcagattggtaaataaaatatttgatcacaaaagaggaggcattaacttttaatttcagctctgacacatgaagagcttgtaggccatcattctcatctttacaacaagaaaaagctggaggccaggctgggtggctcactcctgtaatcccagcactttgggaggccaagacaggaggatcacttgagcccaggagttccagaccagcctgggaaacatgacaagaccttgtctctacaaaaaatagaacagtcagctgggcatggtcgtgtgctcctgtaaccccagctacttgggaggctgacgtgggaggatcacttgagtgcaggaggtagaggctacagtgagccgtgatcatgccactgtattccagcctgagcaacaaagcaagacactgtctaaaaaaaaaagaaataaaagaaaagcctggaaaaactgaaaatcaacaagttttcttacagagaactgaattgacagagataaactctcacccggaaatctagggagataggtgtcacagcgagatacaacaacagagattggcttacctggaacagaagctgctgggccagtgaagtagcaagaacaagcaaatggcaattttggtacagtgttggtggctgagtgtggactggagtgagagtgaggagctcctaaaggccaccgtcttggggtcgtcctcacactttcacagactttctctctaggaaccttaccagattctcacagtgaagatcaaaccttctccataacaaaggtctactctccacggaaaatttaaaaaaaaaaaaaaaaaacctcttccagaaccacattctgaaattttgtctcacctgcaagaaataaattccttcccactccagccctctccagcctacctatatgatctaagttgtgaaaaaaaaaaaaaagcataatcgagagtcaaggcttcagagaaatggattgggcatgctgcagccagagaacagagcagggatgccgggtgggggttgtggggacatctgtgtacctggaagagaggcagacacttggaaggacacggccctgaaacacaggcccaaaaaacactgagatttaatcataagtatggaacactccccaaccctcacaacttatgaccacaaaaaaatcaaactgccagccaatagcagaaagatagctgtaaaatcctctaatatctgggaattaacacaacacactcttcagttatcccatgagtcagagcagaagtctcaagaaaaattgaacaatatttttaactaagtaaaaataaaaatacttattaaaatgtgtggtttgcagcaaaagcagtgtttagagtaaaatgtatagcaataaatccatatattcaaaaagaagaaagatctcagatcaaaaacctaagtctacacctgagaaaactagagaaagaaataaaagaggggccactatgactggtcccatcgactttaaaaggtcagtgctcacagatttgattattcagataaaattggccaattccagaagttaagcaaagagaaactgataaactgaatagtccgatttctattaaaataattgaataaataattttaaacctttcaaaaacaaaaacagagcacaatgttcagattgcttcactggtaattctaacaaacatttaaagaagaactaataccaatgctccacagtcttacagaaaacaaaagcagatagaacacttcttcacccattccattagtctagcattattctaatatgagaaataaaaacattgcaagaaaagaaaactttgtaccattatttcttatgaacatatgatgacaagtatagaaaaagatgctcgctattatttatcattaggaatatgcaagttaaaatgaccttgaaatagtactgtgcatctattagaatagttaaaatccaaagatctgatagtatcaattgctgacaaggatattaagtaatagcaactctcattcattgctggtgggcatgcagaagtatagagccagctcgacagtttcttacaaaactaaatacagtgttgtcttaggatccagcaattgtacacctgggtgtttgcccaactgatgtaaaaatgtatgtccacataaaaatctgcatatcaatgtttataacagctttgttcgtaattgccaaaaatttggaaccaatcaagctgtgcttcaactgatgaataaatacaaacttttgtttggtacatctctcgacagtagaatattattcagctataaagtagaatgatgagtcaaaccactaaaattaagtgcatattaagggaaagaagccagtctaagaaggctggatactctatgactccatttttatgacattctgaaaaaggcaaaacaatagagttcagaagcagatcagtggttgttagggatttggggaaaggagaggactgaacaggtgaagcatgcaggacatttttagggagttgaggatattatgtatgataatgcaaccatgaatatgtaacaccatgtatttgtcaaaaccacagagccttccagcaaaaagaatgaatcttaatgtaggtgaattaaaatgtaattaaaattttcaaaaaaagcatttaagaggtcatgggaccccaggatgaaatggagactgtgcaaatcaatctaattgtattacaaatgagttaaataactttactaattggatgctgacctaagtaactttggagatgaatggaagctgtatgactaaaggcaaaaagaactatacctaaacattgcactctggttgacaaagttgtttctaacagggacttacttctgaaactactatacatctaaactgtaattaaacaattagggccctgggtggcagatcatgggagttgggtttctcaccatgaagtgggagtttacaaacaagctagggaagaggctagaatgagctgtgtggtacctgattagacttagagacatcagtacgaactcatgtttagctgaatagagatacaatggatacatacaggaatattcatagatgtgtgtatatacatgtgttagtatacacacatttttttttctgtcagctaagagaacctggaagcaaggaacaatgccacagtagcaataaacacaactgtccccaaatcttggtttctaataggattttccaataaaatgaaccaggactcctttgagaacgctaattctaagactggtaagggaatataaaagaacttggaacttccaagcacttggaacttcttgtagagttagaaaataaagaagtaccaagaaaaaaaaaaaaaagaaaagaggtggagggggaaagaaaggataaaataaacaagcaatgatggtgatacatcaataggatgtgggagccacctgaaggagttcccagtggttaaatctggaatcatttgagcaacagaacaaataaggcggtattggattataacccaaagtttaaaataaatacaccctgataagtgtatcagtgtaaaataagtgataagtgtaaaataagcccacactgatataaatgattgaataaatggtaacaatagccaaattttcctgacgaaagaattccaagtaatttatgtagatataccacctcaagaagatgaagcataactctcactccttatgtgtgggctttgcagagcgacttccttccagaaaggacgacatggaaagagaagctttccagtggagaaacctggcaggcaccaccttagccaggtggccaaggtcaacagcgacactgataagccctgttgatagcatttacccttgatatgatgtgatgagaatggtactttacctccgtagtttgccccttcaaaactctcataacctcagcctaaaaatgagaaaaacaacagacaagccccaactgagaggtattctacataattcctgaccagcattcctcaagactgacagtcatcaagaacacagaaagtctgagaaactgctacagaggagcttaagaagacatgatggcagaatgtagaatgggatcctggatgggatcttgaaacaaaccagggacattaggtagcaggtagggtcatctgaacaatgtatgcacttagttaacaatgcattaatagtcattcaataattgtaacaaacgtgccacactaatgtaaggtgtaaataatggaggaactggatgtggagatgtgaagtatatggggacttcctgtgttattatctcaacttttctataaatctaaatgtattctaaaatgttgcttattactttgaaaaaccaaatagaagagcaggtatcctcccaggtgtaccagtaagggtagcagtgggggaaaggggtggtactctgtagctacagacctcaaaatacctgtatgatcttaagacagagtcatcacatttcaaattctgagaaatatcatgggaagaacttgagacagctgctaggcctttagaaaacaatttaccccaaatgttgtctactattggtaaagtagcatttcctatcagcctcagtcttgtgacaggccacaaaaatgacccttttccaaagagttggttaacatgccataagatgcctgccctgttctatcttcaggaaggtggcagctgggaggctgagtcattgtgctgtgattctcacaggatgcacctgtcttctggaaaagctcgaagccttccaaatgctttagtgctgaattctcaggaatgtggcttcagaatgggccagagtcaaccatgacacattttatcccagcatcagtctttgatccttaaatgatttttttttcctcctagagcctaagaaactactaaagaaaatgtggtacatatatcatgaaatactatgcagctataaagcagaatgagatcatgtcctttgcagggacatggatggagctggagaccattatccttagcaaactaacggagggacagaaaacaaatactacatgttctcacttacaagtgggaactatatgaggagaacgcatggacacagagagagtaacaagacacactggagccttttggagggtggatggtgggaggagggagagaatcaggaaaagtaactaacgggtactaggcttaatacctggataatgaaataatttgtacaacaaacccccgtgacacaagtttacctgcataataaatgtgcacttgtacccctgaacttaaaataaaaattttaaaaaatgttaaataattgctgaagtataaacaacataaatggcaaattaacttttggattggttaaagatctatattgctgttcttgaaagaggtctctaaacattagagaatgactttgggttcatttgttacagcctgacacaatgaggtctttgtggagggctgcatgggtttgggacattttgttgccaccaggcctcctcacttagctcttgtccgtatctatatttctttcatttcgtagccaaatagaaaatatcattttaatatagaatctcttctgctgcttgatatctctcccgacattaaaatagcacccctaaagaaatgcaaggaagtgaactgagctattatcaactcagtgttcaagggagaaatttctgtttcaatccaagaaaatccgagaacccactgaattacaaagaattgtctaccaagtaataaataaaactatgtgttccacatttgtgtccgcacattgtcaccaaactttctgtgcatcttatctatgttccttattgcagagttcactaccatttggggagaaagtcaagagcacaggttctgagggccagactgtctggctttgtatcccagctctgcgatgtactaactccatctcttccagccttagtttctccaattgtacaacagggatcataagagaacacatctcattggatagataagtggacgtgcaagagttaatgcatgtaaagcagttcgtaaataagtgctatttatatgtagaaagtctttatcaaacccataagggaatagatattttcatgttggaatcattgcctttcagtgtgaaaatatatcaatgtagtgatggttctgggatcttggtcaatggtggagcatcaccaacacacttgtgtctgattccaagaaggtgttggaggacagggggactttctctgccctctactttcttctccccttagttcacacaaatcgaggctctgaggcctggggaaaagtattgttacctttgtgttctctccatggtcccaacaaagatcgtgtggaccccagcggtaataggtagggatagggaagcaactggcctccgggaatatagagacgtttatcaacaaggtctgcactatctcaggatggatggcggggcctcttaatccctcaacctcctggatgagggatccaggagggcactgttgagtccacacacaaagaagggtggaggagaagatgtcatggcttctttcatatctggcaggattttagccgttttgaagatagagaaggcttaaaggttgaaggtgggaaaattacaaattgtagagtatttgagtgggaatgaatgtgggtaaggggttttgagaggctgtgcctgagatcgctgggggaagaggctgggatggcaatgagcttctaaacacaaggcagatgtcatgggcttggtccaaagggcaaggtgcagccgtgaaatgatggtcaaggtcaagtggttggggcaggtcttgtaaacagaaatgaaggcaggcagtaaagagaagggaaatacaagtacgcatatgtgtacactcatctatcattcacaggcttaccttgttggcaggaggatctgagtctgagaatgggcagtgtctttcatgcagttggcctggccaatctcctgtgaacagggatgtttcagtgtttaccagtacacaacctgagtgtatggtgtgtgtacctcgtgtgagtgtcatgtgcttcaccttgtagcatgcacagtacctccttgaaaaggtagtttctaattcaaaccaacttacatttttatcaagagtccatagagccaactacatgtgggattgaatgttcaggtgaccgacaattcaatttaggacaaaacatggacttgttatcttttttgaagtgtcctttttaacttgaatattcactggcatataaatatgaaacgtaagatgtagccttagagatggttgtcccaatagctgtcatttgagaggatgcagtgtctctgatactcattttagaaaatatgaaagcaaatttttatgtttatttttgactattgtaaaatcttcaaatgcagatttaagatgtcatttattgccaattgttgatttttgctcatttgtgcatcaatattagtttatggaattgaattctctttttgcaacgttattgataattttagtgtatatagtagaaggctgcatttcccaagcagtctttccccatcatagagctcttcccatcagtgtcattgcctctagccagacttcttatgtttctgatgaaatgtgaaagataagcatattcctgcaaggaaaccgtaattgttttcaaagaggagcaaacatctttctttcatttcttctcaacattcacttaaacaattgactaagaacaaaactaccagagatgtgtaaataccagagacatttaaatattaaatatgatatccatttatcaccagatttattctcatttgcaatttaaccagatcttgtttgaaatagtgttggtgttcaatgatgcatgagtgataatcaaccagttaatgaaagattatactgctttgatttcttgggggagaaaaatagactgaatcataggatatttaaagagttcaaaaattctttttcagttaaaaaatccccatttttatacctagccgaaggttttctcaattccctagtacatacattgttatgacactgtgggttattttgagaaattcattttgcttcatcctgatttcattcattcttcacttctctgaaatctaggaaatgcaagtgcattccccagggacccacagcatgtggggtggggtaggggtttccagaagctctccatccttcctgatggaggcaaccatcacatgggcctatctgggcaggtgggaaatatgagagggcatttttgagcaccctctctgttttagagaggccattaaatgtgttcacataagtgttgtcattctcatactcagaaaccattctaaccttcataagtgaatgagagcaactttttattaatgttgtaacttttaacaatttcacattgaaatatagcctaggcattttattagatcatgttaacaaccgctattgatgacttaaaagacaaaaaaatctatttagatagatacatggatgtgtctgagcatgtgtgtttctaattataatgtgtatatatgatatgactgtagaaaaaaaaggtaacttagattttcgttaaagatgtttaaaaatactcttctggttctgagaaaagctgtcttcctattggagctttttttacctgtgtttaggaagcccatatgtcatgctgcaagaaaagaatgtgtttaagagctgaaaatggcatttcccttaggatagtagcagctggaatgaaagcggtgatgatggcaagttcaacgtggctcagaaatgacttgaatgggggctctcaggctcaagtgatgggctggtctctgggttgcaggactaaggaccatgttcaggtgttacctggggttcagggccctgcagcctggggacctcctcaaagctgctctgagggtgagtctcaggaggcaactccaatcctgcaccttcctcttggctcccacatcgggagcagggactgagggcaggctgctgggcaggtctcctggtgtcaggaggggaaagagaggccacaccggacacacctgagaagggaacaaaggttggtagggatgctggaggggagcgtggtcatgggtaaaagaatattgagcaaagaacatttccagggattaaagtttattatatttgcagatttggccctcattctaagaaacttccattagactttagatctttaatacagatcagtatagatttcaaactttaaaattgtctcaattatatagaaggacacttctcaagatttttgatcctaggaccactttataatcttaaaaattcttgaagattccaaagggcttttgtttctgtgggttggatctatcaatatttgctgtactagagattacactgagatatttttttaaatgacaactatgacatattatcataaatatacttcttaataaactatttttagaaattggtgagaagaggatgaattattttacattttttgaaaatctctgaagtctggcttgtagctgcttctgcattcaatctactgtgatgtgttatgttcgttgaagcatatgaagaaaatacaattcgcacagaggtgtagttggacagggaagcttaatagcattttcagatcatcatggctattgctctttgatactctaccaaaatttggcaagcggtggtttttaaagattaattcccatgcagaaccaaaaaccatatcaacagccttttcctaccctattgcattaaaatatatcagtgtttctggatcttttacacatgcatgattttataacaccatgcattggtttttggaaagtatttattcacttagtaatgtagacgttccaaatgttgatgcactccattatacaatacttttgaaaatcacatttataatatcactactaatgtcatccaaaatatctttaaatattgggaaggtgtgttaagcatgtggtgaagaatccaagttttctaaaatcgaattaagacttaaaagctcaaattttaccactggcaacaaacactctcagttgtttcccttgaagtgacaggctcacttcattccttttgagaaaatgtttgtcaaatacccagacaaaaatagtttatcagtttttctttcaagtagaaatgtgttccatgaaaatcacagctgatcagctcatattcagtcccacactggagcttttcttgagcacccaacacacaggtgctttgtatgtttctgccattctgtcacacagaatgttaaaaacgcacaccctcaatggttgagatggaatgaaatgaaatgatttccactgcttagtcaaggacatgctgaagtgaagctgccacgtttgtttttgttgcgagtgttgacggacaattgtgaagaccacaacggccgtgagaagagtttggtgccactgccttgaatcctattaaggccccagcagatttgcccactgttgcttttgtactgttggctaaaaaggcaaataattttttagtgttattctgaaaatagctctgatctcacagatcctttgaaaaagtatcagggatcccaggtgttgttggactgtacctgagatcagttgatacaaaacaatcttatgattactatttatatgtatattatatataatatgtattattttatattatgcatatcatatatattttatgttatttatataataatcctattacgtatgtatattatatatttatatattatacatatatgtattatacacgtacacattattatacatataaatatacatatgaaataatttttcaggttatctagatcttggatctgagtaatccaatcaggtgtctgattgtaatgccctctgcaggctgggtagtgtggtggtggcatgggtgggacaggtagtgtagttctgggagagatccgtctattattcatggtttcactctactcaactctttgaggctctcaactctttttcatcctgtttgacactccacaactcttgcataataataaacagaggtactatagtcaggcaaaaatgaatttaaatccttactttgcttctcactagccatgtgaattgtagcaggtttctgagcacctctgagcctcagtttctgcatctgtgaaatggagataatacaaagctacctcctaggatggttcagagattaatgaaattaaaacctccattgatggagtgacctcagacaacacgttgtaaaagtaagcttgtgcagcctcgtggcccagtgagcacagtgatgagcgcagaaggataaatgaccaccttttggttgggtgctagggtgagcctgctgcatttcctaccgcttttcacacatgcacaatacctctatccaccttggaatacaaggaaataaattgtgtcctgcatctgtttcttcagtcacagttaagctgtgaactctcatggggagtctcatatagctattctaatacatcctcatcactgtgtggcaccaaaattgtggagactttttattaaagattatacagtgttagagtttatcatagcagagtttgcataacatcaaatttctttatagtctatttatgtaccatggaggaaaaccattttaattaaaaagtgggataagctaatttatctcttgaataccaaatgtcttaacctcaaaacccaggctaaggttattcttacaaatacagaatgttttcagaggagacaaaatagtgaattcagtgaatattttgttgtacagtccattctgtattttccttctacattttatttattaagtcagacatgtatattcactttaaatgaaactcttctaatgcttgacttggctacgtttggaaatagccactcgaggttggttcatggagaaagaggtagctggccacacacagacaatgactctccctcaagtgtacacaaggtgctcacatcttcccaaagcctgcttccaggaccccaggccacagtggatgtgagagagacaggatgtcatgttgaaaggcagttttatattgctaaggctcccataacacagttaaaaccaaagatcaaatctaacctggcaaaacgttgaaaacagtttacagctgtttgttagaaaaagttaagccattaactccttagatagccttgattcccgttttctttttgtccacagctatttagtatcttttatggaagtatagaatatttatgtctgaactgcaccaaacatattcaaaaatgctatttggtgtatatataacaaaagtaaacatatgtaagatttctacctgttggcatttgtattaatttacaaacatttatgaagtagaatgctactcaaaaaaattcatttaacttcacttgttggttattggttttattaataaacatatagagaaacaaaataaatgataatatggaatattggcagagatgcacaaatatttacattctgatatatcatttggcaggaaaattttttaaagcaatttgacaaaatatatcaaaagccaaagacagttaatgtcttttgactcattaatttcacccttaattatctataccaaagaaataaaagttatagacaaatatttatgtagaaagagtcaagacagaactttaaaataataaaaaattgtttctctctaaatagcttaatgaagtgactgcttctgtgaatggtggtgcatcagcctaattcaatattatgtggtaattttaaattatgggtttaaataagttttcttaatataggaggcagtcgtataatatagctgcatttttaaaaagcaggatttgaccaccatgatcaagtaggctttatctccaggatgcaaggttgattcaacatacacaatcaataaatgtgatttatcacataaacataactaaagacaaaagccacaggattatctcaatagatgcaggaaaggcttttgataaaattcaacactcattccatttcaaaactctcaataaactaggtattgaaggaacataccttaaaataataagagctatatatgacaaacccacagccaatatcatatggaatgggcaaaagctggaagcattcaccttaaaaaccggcacaagacgaggatgccctctctcactgctcctgttcaacatactattgaaagtcctagctagagcaatcaggaaagagaaggaaataaagggcatccaaataggaagagaggaagtcaaaccagatgacatgattctatatgtagagaacttcatagtctcagcccaaaagattcttcagctgataaacaacttcagcaaagtttcaggatacaaaatcaatgtacaaaaatcactaattcctatataccaacaacagccaaactaagagccaaattagaaaggcaatcccattcacagccacaaaaagaataacatttctaaaaataccagctaaccagggaggtgaaagatctctacaacaagaattacagaacactactgaaagaaatcagggaagacacaaacaagtgaaaaaaaaaatcccaagctcatgtataggaagaatcaatatcattaaaatggtactgccaaaatcaattcacagattcagtgctatagctatcaaactacaaatgacattcttcacagaactagaaaaaaatttttgaaattcatatggaaccaaaaaaagggcctgaaagccaaagcaatcttaagcaaaaagaacaaagctggaagcatcgcgttacccaacttcaaactctactacagggttacagcaaccaaaataccatggtaatggtacaaaaacaggctcatcgtccaatggaacacaatagagagcccagaaataaggtcacacatctacaatcatcttagcattgataaagctgacaaaaacaagcagtggggaaaagactccctattcaagaaatggtgctaggataactggctgaccatatgcagaagattgaagctggacccctttcttacaacatgtacaaaaatcaactcaagaaagattaaagacgtaaaacccaaaaccataaaaaccctggaagacaacctaggcaataccatcctggacacaggaatggcaaagatttcatgaaaaagataccaaaagcaattgcaacacaagcaaaatttgacaagtggaagctaattaaacttcagagcttctgcatagcaaaagaaatgatcaacagagtaaacaacctacagaatgggagaaaatatttgaaaactatgcatctggtaaaggtctaataatcaggaacttaagcaaatttacaagaaaaaaacaaaccaccccattaaaaagtgggcaaaggacgtgaacagacacttctcaaaagaagacatatatgtggccaacaagcatataaaaaaatctcgatatcactgatcattagagaaatgcaaatcaaaaccacaatgagatatcatctcacaccagtcagaatgactttaataattttattattaaaaagtataaaaataacacatgctggagaggttgtggagaaaaaggaatgcttatacactattggtggaagtgtaaattagttcagtcattgtggaagacttgagtggggagagtcagaggagggagaggagcagaaaagacaactattgggtactgggcttaatacctgagcagtgaaataatctatacaacaaacccccataacacaagtttacctatgtaactaaaccttcacatgtaccccaaacctaaaataaaagttaaaaaaagcaggacgtttgaaaagtatatgtatacatatatgtagtattatgttgacaaggctcagaaatcatatctttttagatagaagaaaatgtgcttgttaaaatggttgcttctctcagtattacaattatgaatgatatctttctatgcttttttatacttttctgcatttttcaaaccttctgcattaagcttctattcatttgcaatcagaaaaatataatcaagaaatgtaatacaataataagatatatacatagtcttctgagacttcaaatataaaataatcttgaaatgatgaaaatctttgtcatggcatttttgagaaagggataacagatattctcttttagaaagccaggttgtgttttagagtttgaggagagaaatctgtccactggtcccttttctggcctgggaatggaatcattagttgtgttcagtttttcagacacagccatctttgttttctacttagggtgaccgactttgaaaaataatgcaaatgacatgagattctcggccaagaaaagacattggtcacttagccctgccaaggtgtcctgtctgttccatcacattctaacagggcagcagctccaggggggaggtagggcagtggctgccttctcatgggggcactggttggctgcgggaggggcctcctggccttactgctgggtgttacctgtgctgctgtgacaacagtctcatctgccaggtgcaaaatctgctctatgatgaacaatttaagtgatattccttgtggttgcataaatctagtttaaacagtattgacattttcctatactcacagttctcactttggttttgtaactgatgatgcattaataggtgttgattatagatatccatgtagataagcctatgatttctatcaagattctaaaatagacggactttgcctctagaggtttttaaaagctttttttataaagcaaccagtttaatataaatttcataaaaaaatggatcattggctgggtgtagttgttcatgcctgaaatcccagagctttgggaggccgaggtggaaggatcacttgaggccataagttaaagaccagcctgggcaacatattgaaactctgtttctaaaaaaaaaaaaattttttttttaaattaggcaggcatgctgacacatgactgtagtcttagctacttgggcagacggctgaggtgggaggatcacttgagcccaggagtttgaggttgcagtgagctatgatcttgcacaccagcctgggtgacagagagatcctgtctctaaaacaaatacaaaacaaaaagggctcatttgttttataggaggccaaaagaaatcattgcatgtcttgacttgcttagcacttattctgaagaagaaatattggcgtgaaatgcatgtttataactgggtccttcccatagtagtcttgagcacaaataccaaagttgtttttttttttttttaaaggagaagaaaaggagcagtttcaccttttttatacagaatgtagacaaaatggcagtcatttatgattgatttgttctacctacttagcatgcagggactccccagtgtggtttttaaattaattagttaatttttttctttcattagttttaatggtacaagtggtttttggttacgtggatgaatcgtgtagtggtgaagtctaggattttagtgcacgcatcacccaaatagtatacatttacccaactgctagtttttcattcctcacctccctccccacttctgagtctccaatgtccattacaccactctgaatgccttggcatacctatagcttagctcccacttataagtgagagcatgagtacctggtttttaattcctgagttacttcacttagaataacggcccccagtttcatccaagttgctataaaagtcattatatttttttttatggctgggttgcatttcatggtatatatatcacaattttttctttttgtttttttttagttgagtcttgcttttatgatttttttcctttccaactgttattttaggctcagagggtacacgtacaggttttttacatgggtaagttgtgtatgaaccacattttctttatccattcatggattgatgaggactcaggttgattccatatctttttttttttttttttttttttttttttttttttttttttgagacggagtctcgctctgtcgcccaggccggactgcggactgcagtggcgcaatctcggctcactgcaagctccgcttcccgggttcacgccattctcctgcctcagcctcccgagtagctgggactacaggcgcccgccaccgcgcccggctaattttttgtacttttagtagagacggggtttcaccttgttagccaggatggtctcgatctcctgacctcgtgatccacccgcctcggcctcccaaagtgctgggattacaggcgtgaggattccatatctttacagttgtgaattgtgctgtgataaacatgtgtacaggtgtctttttgatatactgattgcttcaagaacttaggaactctggagtttgatgcatatatatttacaattgttacatcttcttgtttaattggtcattttatcattatatagtgacctttgtctttttcttgttgttttttgttttgtttttttttttttttttgctgttgttgctttgaagtccgttttatttgatatcagaatcgctactccttgtttttggcttccatttgctggaaatctctttttccaccctttacctgtagtctataagaatccttacatgttcagtggtgtttcccaaagacagcggtgtaggctgctactcacagcttctttcaaagctgtttacggtcctgtgttccttcttggaaaaaagttcacagtgtgaatctctacacactattttatctttccaagtggaaaaggaatgctaacaatgcctatattccatcatcttggaaaaacaaaacaacaagaaaaacccaatgtaaatattatcagcacagaatctttctttataggctccaaaatataccagatgcacacttcatattttatcttgattacatatgccactctttagagtctcagctaactatgactgagtaagaatgtcttagaacacaggctcccacgtccatgagtgcattaaatattcttatttccaaagtggccaggctggctgatagctatgactagttggagagaaagcagcatttatagcctaagtgggctgggcaacaaactacctgaaatccttaggagcaagaatagaagggatgccttgttctctacacccaggtatcactcattgcctgatgtctcgcttcgtgtgtttgctgggtttccgtctgtctaggaaaggaagctctatgggggcaatgactccaatgagtttgtctccctttattcctcaccatgtaggtgtggatttgagtggactccaaatggctgggccaagggccttggataccaaacacagcagaagatgcggaaaggatgagggacccaggggttctgtctttgggggaagagccctgttccctggacattgcctccttatatccctgcactagaatatcgtaaaattcccctagtcaaaacccatgatcctgcatgtcttggagaggctgcctcaaggattcctccttgactccacttattttcatggagaaggaacccctccatccctggcatccttaacagattcccttctagcttctcacccactccatctccaagccaggtttcccttcgcttctagaaataatctgcagtggctgcctaagatgttttctgcgtggaacccaaataaaaatgtaataatttaaattagaattttctacaatcatgtgttgctcatgtctgcattatggatacccaggtcacatgtaggtaagcaattagcaattatggtggaaacaagacttcctaacaggtattttggtggaaacttgaaagctgtttctaaagctgtttattcatgcaaacctcattacagtcctgacagtaaacctatgtgtgcacagggaggcaggaggctgtgaggcagcagcaggatccttcaccccatggctcactcacagtgcactctttaaccaggtcttattatgtccatgcttctggggtgattaaaatatgccctagaagccttgatacccaaaataaagcaaaacgtggaatatgaagtttaaaaatgtgaaataataagtaaaagttttgtgaaatacatttttctatactgttcaaatgatcttgaagatggcatccgtttcttaggtctgccatgcaaaatgaccacgatggagtggcttaaaacaacagacgtttcttctctcacagacatctgaaatcaagaagtcagcagggctggtgccttctggaggctctgagggcacatcagttcctcacctctcccagcctccagaggcttcctcaacccttcacactgctgagcctgtggctgcctcactccagtctctgcctccaccttcacatggcttcttttttgtgtctctgtgccttctccttttctgtctcttatatgacattcttcagtggatttaggacccaccctaatgaaggatgaccttatctagaggttcttactttctttaactctgcaaagactgtatttccaagtaaggtcatattctgagattccaggggttgggatgttgatatatttttgaaggaccacaattcaacccactaaagggatgaaaattaaactgaaaaatatcaacccctaaaaaacctgctttattgccaaccatataaattgctctttgtcacaatatacaacagaggcctcacaaaccttggtgttcttggtgtgagaatggtgaaaaacaagatagaaagcagcctgaaatatgcacaggggtgtgtcatctcgttactgggaaaggatgtactgtccaagcgacaactagactgcagaggtaaggctgagaccagggctgccatggtgtttagattgaacatgaagttagaattcttaagtatcaaaactaaattcatgttcaatctaaaccccatggctatgcctctcaaggtgaggcctctgtgttgttctctatgccttgagcacccttccttctttgcaataaaaaaagttgcagaattgactgggcacagtggctcacgcctataatcccagcactttgggaggccgaggcaggcagatcatgaggtcaggaattcgagatcagcctggccaacacagagaaaccctgtctctactaaaaataaaaaaattagccaggcgtggtggtgcacgcctataatcccagctacttgggaggctgaggcaggagaaatgcttgaacctgggaggcggaagctgcagagagcagagattgggccactgaactccagcctgggcaacagagcaagactccctcccaccccccacaccaaaaaaaaaaaagcttcagaatttcagtctcccacaacaaaacccacacacacacaaatttgtgtagcagctactatttgccaacaattagggtctacacaattaagacatcatctttaacctcaagcagtttacaatccagagggcaatgatggaggagaataatgaggtgtggataaaagtgcctattagcagagtatgcagtggaaagtgtgataacacttctagatagaaggcagttggtccataggtattttggtgagaatctacatgtctgatgcatcatgggctgtaccaaggacaagtcactgcctttggaaatgtttgactcatgccctgatggataggtggataggtctacacatcaaaaatgcatgcctggctacacatttatgagaacaacaaaaattttttaaaaattataacgccacatgctggcaaagatgtggagaaactggatctctcatgcattgctggtgggtatgtaatatggtgcagacattctggaaaactctttggcagtttctcataaaactaaacatgcacttaccatgtggtccagcaattgttctcttaagcatttatcccaaagaaatatgaatttatgttcacaaaaagttatataaaaatatccatagcagctttctttatagtagctaaattctggacaaacagcaacaacaacaacaacaaaatgaatgtttctcacaggtgaatggttgaaaaatctatggtccatccatagtttggaatgctgctattcagcaatcaaaagaaatgaactgttgacacacacaataacctagatgagtctgaagggcattacgcttagtgaaaaaaagccaacttcaaaaagttatctttataaagcattctcaaaacgataaaacagcagaggtggagaataccttagtggatactagtagacaggtacaatgggtaggatggggccaggtgcaaacacagacagataggaataaggaattcttctgtggtgtggaatagttcctcatttgatggtggtggtgggtacatggacctgtaatgggataaagttaaacggaagtatacacctacagagctacacgagcacatacacacaaatgaatgtgggttaaaaataatgaaggtggccaggtgcagtggctcatgcctgtaaacccagcactttgagaggctgaggaggatggaccacctgaggtcaggagttcgagaccagcctggccaacatggtggaaccctatctccactaaaaatacaaaaattagccaagcatggtggcacatgcctgtaatcccagctactggggaggctgaggcaggagaatcatttgaacttgggaggcagaggttgcagtgagccaagatcgtgccactgcactctagcctgggtgacagagcgagaatccatcttaaagaacaaataaatgaataaaagatgaaggcatctagtctactggataatgttaactgggaatgttcccatgtgggtttcctggctctgatattgcaccacagctatggaaattcacaacatggccagaagctaaaggacacacaggactctactatttttgcaacttcctaggagtctgtattgcaaaactttagctttgtaaaagtaaatgccaaaagatatatatgtgcaataaatgtgaatatatacattaaaaagttgtgggagtttggagaagggagagccccttgtaggggtgaggtcagggagggctccatagaggaggtaggacgtgagtttaacctggaaggtggaatgaaatccaacttgaagaactggaggtaattttcagaatggcaaaacagtgccagccagtcatacctggaaaaggaaaaccatgttctcagacctcaaaatagggaatgggggaggtggagaaacatacaaggtatgtttgagtgctggggtggaatgtctgggtaaagaaggagttagtgggtaactggaaacataggttgcagcaagattataaaacgtcttaacttttaagctgtgaaaactgagcttaatctgtaaatagcaggaagacattgtaaattgcaagtgagaggatatcatactggaagttgcatgtgaggaagctgagtctggcagagccctaggatagactggagtggaaaaggaagatgaatgagcgatgagttataatgccatttcacagcccagcacaggcatcctgattatggcttgcagtaagctgatggtcacgggcctagaggggacaagtctaatttaaatgatgctatgaaccttgaccaagaaggaccaggccactgattgccttggggacctggaatccatccaaggaggagcctgggacaggaatagggacagggagaaagcttggaaggaaaggtgccacatttcatctgtctcatgttgattgtaaggggatggtgtgccttccaaatggaagtacctggctgacctccagagatgggagacagcagctcaggagagagtggtcagggctttataagaaataatcgagacagcccaagcaggtcagatcagcaagggtaagagtggaaaagagagcagaagaggaagaacagaaatgtaggagtcttgtgtgtgcaggcatcgccatgcaacgtctatgaaatgagtagtttctcacttcatccagtcttcttcttggcattttgctcaaagcctggcattatactggacaggtccagggttggccacacaccctgcataaccttctcactcatcctcccccactgcttccttaacaacctcctgtcactcactgtcatcaaggcggaagcatgtgcacttcacttcatcaaccatggcaaccagctctgagagtcccaagtggaagacgatgaggggagaatcactcattgtcctcgtggctacaggcagcctctctgagcccacagaacctcacccctacaattaatcctgaatgcgagttctcaaaatagtgcccgctcatttagctgtcagctgtcttgctcttagagcttctgaaaagaaatcacaatagctcagacctcatctttgaggggctgtttgttttgagggctttttccttagttgcatgcttcctattgccagcaaaaatttcttaatcttcctagaggatcagattggcctgttttagatttttaaatgaaaggttaagaggagggaggagtagggcagtgaaagccgcagctgcctctccatatttctgtttcgcaacccaaggggattttgtgtagggctaaatggaaccccctacggataacagttatgtcaggagatctttctgcatgttctcgtcatactcaaaatgttccttcacatgtaagttagagaggacatgttacttctttccccagctgtttcctggtgagtaagaactcctgaccatgtgagaatatgagagcatgcagcactccaagatccttggggaaaacaatgaaagcaacagctcagtgagccattctccatgctcaaccgaaaaccctttgagattcgctgccactttctgtgacaatggaattgtggcccggtttagcccagaaatgtgttgcccaggctggagtgcaatggcgcaatctcagctcactgcagtgtctgcttcccaggctcgagctattctcatgcctcagcctcccaggtagctgggattacaggcacccaccaccacacccagctaattttttgcatttttagtagagatcaggtttcaccatgttggccaggctagtctcaaactcttgacctcaggtgatccacccacctcagcctcccaaagtgctgggattacagataagagccaccatgcctggccagtgctgctcaaatttgaaccaggaatatttgttgatgggaacatacactaaatctattactccatggattccatttttattccattgataatgtattataggtattattaggaactaacttgtgtctccccctaaaattcgcatgttgaagccgcaactcctgctgtgactgtatttgaagatagaggcttaaagaggtgattaaggtaaaattaggtcctaagggtagttctcatctaatctgactggtgtccttctaagaagaggttagcgtgtagccacacacatggaggagtgaccgtgtgaggaccccaggtgaagatggttatctgcaagccacggagagaggcctcaggaggaatcaaccctgtcaacaacttggtcttggacctcgagcctccaggactgtgagataataaagtcctattattgaggccaatccatgataatttattatggcagacctagcaaatgaacacagatctatctttctgagactttacattatagtttttgtgttttaggggctgaataatatgccacttatagatgtgtaattactttttaagtaactgtgaacatttatgttgtgcctaaaggctcctataatcaataagattgcaatgagccatccttatacataaactatgcacatttatctaattaatttcctaggataaaatacaagaaaaggaattacagggtcaaaagatctgctcacacaacatatttttacacctggccaaactggcttcccagaagactgtaccatcagacatttccattgcaagactagagtgccagcaccccagtccccacctcctaccaaactggacactttcagtcatctgctctgcaatggcaagaaaatttcacagaaattaaagaaattatagaaagaatttgaatatcttggtattttaatattgaaatttccatttgtttaatgaattctctatcctttttcactttttctgggattgtttttagtatttataaatttatgttattgcataataatacttttttactatagttacaattttttttcggtttgactttttaaaaattttgttttccatatttatttgtttgcatgtttattgccatacagaatctttagcaggatgcattgtcaaatctgctaagcactatctttgtggtttctatcctggggtatcatgcatgcaatgtctttcttttcttgaaatggaaaataaatcacctaaattttctttaaattgtttttgttttgttttgagacaaagtcttgttctgctgcccaggctggaatgcagtggcatgaacagagttcactgcagccttgacctgttgggcccaaggggtcctcccacctcagtcccccagctagctgggactacagtcatgtgctaccatgctcagttatttattattttatttttgtagagatggggtcttgctatgttgcccaggcttcttttgaacatttttttttttttttggcaaatcccaggaaaagcaaggattagaaatgtttactaccacattattgggatttttaaaaaataaaagcagagttttaacttacttgatataacacatccaaatagctatgtggaaatggcccaggaaatatggttgatgctggaggcacccattcctctcactgggtctcaatgtgtgccctcctccaccacctacccagctgtaccattgtacctcaggaacatgtagaatgtgcagcctctggagtcccccctagacccactgagtcagctccacaggtcgggcctacccccgtgtgctaacatgccctccagaggatgctcacagcctctgctctgctacccagagctgcctccttgacccctggcctcaggtgcttttccccagcagtttccagtggattcatcctcacatcctgttcctgtcattagggacacacctactgggatgaaggtattctggtgacagctcatttgctattcacacaggcacacacagactcacacgggtgttcaaaggtctctttacctagacgcactgacattactatccttagaactgggtggagttcagagagatacagttagagcacaggttacacgttgtgtcagatttcacagttccctctgctttgggcatcccaggctctctaagaggaagcaggtgctgctgccaatgccaaaaagcctctgtgggtgagatagttccatgtcgaatataaaaggccaaatgtggtaaaacctccaatacttattgcataaatcctccctaaatgggatggagagagcagtgcaacaatctttcttcaggagaaactataggtgatgcttttaaacattatttactatccttgaatgtttttgaaacatgcttaaatatcttatatgcctgttttatatgtgcatatggggaaatatacaatataatattcaccgaggcaaagaattggggacatgatcaaggagatatttttaatacttcaacagatcattttttgtggctctttagcttgggaccttgtgctgtgagaggcacaagtttctgtgttcaagagaacacttttttttttttttttttttgagatagagtcttgctctgtcacccaagctggagtgcaatggtgcaatctcagctcactgcaacctccatctcccgggtttaagcgattctcctgcctcagcctcctgagtagctgggattacaggctaccatcaccatgcccagttaatttttgtatttttagtagagatggggttttgccatgttggccggtctggtctcgaactcctgacctcagatgatctgcctgccttggcctcccaaagtgctgggattacaggcatgagccactgcaccaggcccaagagtacacttacttgcatgaaggagcagtgaatgaaacctgctaaggcccccagcatgcactgcttggcagcactcatcttccttggagctgaatcttctagcaggtttctgcttcatttagagccgtcaatacctcaattagtgtctgttcgtctcccctgggagggacctttacacatgtctcttcatgagcctctgaactttaaaaaccccctgagagttgctgggtcataaaatacctcctgattaacagtgctgtttgccaacaattccttgctccttccatttcccccttcttaaagatgtatcaactgacataaacagaagacacagaaggggtgcagcctgccaacagttacatggaatgtattcctgcaaatgtgccatgcatctgtttacccatttcactgctggatgcagggctcataagcccataacacaaagcaggaaaaagcactggttttagttgcacatgtgactgtgtgtgtgcatgtgcagacacacttgcttgtgttggcatttactcgaaagctaggatacgacctccatctctttgtatcattaatactacagttcagttacatgagaagaatctcgcccccactttgaattatgaaagtaaaggcgctggttctggcttccacaggctgggtgtattccttattctttcagaagaggtgcttttctatctgcaaaaccattggtgttattttgtatctccatagcctctctaagtcagttgtcccttccacaaacctataaaataggccaaggttatagagaccatctgagaactttaaggttttcctttatgagaacgttcttaaataagtaagaaatatatagttgtatatttattttctaataaacataataaaaatgcatcatcttggctttcacacaaaatttgggagaaaggtttcaagataattaaaagtctttaggagccattgccctctagtcttccagcagacacccaggcaggtatgaacataaacacacatccacatccacgcaaacacatgcacacaggcacacacaaaagaatgaatgtacatgcatagaattgcacacgtgctcacacaggcacattcatgggtacatgtgtgtgcacacacgcacacaaatatgggccctacaattaatctgtagcagcaatctctttgaaaacaccactgggaaccctattcttggaaagtaagcagaccatcaccccattctcttcaaaacaagttaacaaaagttagcacttaaaacacccctgttttccttttatcttttacctatgttgttaatattctacgtgatatgatggacacaaccgttatattatttatcaaattcattaatatttcatttaaaacctacataagtgaaatttacttttaaacatattttatttattgctcaacctttataaaaaccacattaaatatttaaaatttttaaatctgtatgatcccattatcttaacactttttttcttacaatccttgcctatacatatatatgaaaagctctttagccgtacaggaatgtacaatgtaattagaaaaccaagtcatgaacacaaatattaactagaaaaaaaactaaccttataagcactttataatctacaaaggtctttgcatgtatttaattgtgttgcttctctctattgaggtgggcatcacccttgcacccatttgatagatgattcagaacataaatacccacctaattttatagcttatcaattggcagagccaaaaaacctcaaagttagctctgctgattccaaagcctgagctgcttctgcaatatgcacgcagggtactagaaaacaaggctctgggtgacgggtaggggagggatgccacaaagaacagatgtaaagcagcccccaggtgggggatgattcagacaggttgtgggaccccagagtgtgcatttctagcatgttcccaggtgatgctggttcagggctgtataataactctgtgtataaaaggaaagaaacaacaggtactatacatgtatggtagatatctgcaaacataaggtggaaggaaagaagccagacacaaatgaatgcagaaaggttgatggtattttacatacagttcaaaagcagccaaggatgtaccaagttgttcatgcatccatacccaggtgggaaacagatgggctgcatggtttaaaattctggctccgctcctctctacctgtgtgatcttgaacaagccatttagcctctctgtgcctcaatttttatactcatatttacaaaacctccttcctaggattgctgtaggtattaaaagctaatacatttctcagcagagaacttaatgcatattagctataattatcatcctcattattacaccagatgtttttaaaagggcatttatgtccttgatactagcatagtcaaatgaaaaaggaatgaaataaatgatacaatccagataaccaaataaaaaaaccatatgggcatcacatgcaagccaatggaatcatgccactaatgcttgaatgaagaggcacagtggaaaatgaatattaacacagatgaagatcacatggtcagagtggtttcaaggaaaaggtgaaactttaggaatcagaaatatggtggagattataacgttgaaggaaggatcaaaatactgggcgttggcccattttggacaagaatcttcaggtagaggagatccctgggacaccctaaagagctattagcttgtaatctctacagcaaccctaggagggggtgctgtaattataggtacagaaattgaggcacagagaggccgaaggacttgttcaaggagataaccagcccagcttccagaagacacagcacactgaacggctgggagccacaggcagtgtgctgtgcagtgggtgatggagacaagacatggtagaattcaccaccccattgagtgctaatggggatgatgatttatcttctctgtttctccatgaaaaacagctgtacataaagcagctgctcaaaagttagaacatggcttcagacatgacaactctgtgtctgtccccaagccacatggaaactgcttgccttctgggaaatgcatctgaatataagagtgaagggtggcgggggtggaatccaccccccagctcccacacagggttgttggcaggctattggcccaagacttgtccttctcatggtcctctccataggccacatgggtatcctggtgatatcatggcaggcttccctggagcaagtgatcagacagaaagagagagaactggggcacccaagtagaaggtagaagctacagtccttttataatctggtctcagagtgataaaatgtggagagtttgaattccaggagatgagattaccacaggtcaccttaaaaactggctaacccatggctcataatatatttttgctgcaattaatatcctggacagcacttacccaatttttcaggatgacatgatctattttcttccttgtttctttatttttttactatcattgatggcaggaaatcaaaatctatttactattttcctttttctacataattattaagaagttttctgctgagtacaatggctcatgcttataatcccagcaatttgggaggccgaagcaggcggatcacctgagattgggagtttgaaaccaacctgaccaacatggagaaaccccgtctctactaaaaatacaaaatcagccaggcatggtggagcatgcctgtaatcccagctacttgggaagctgaggcaggagaattgcttgaaccagggaggcagaggttgcagcgagctgagatcatgccactgcactccagcttggtcaacaagagtgaaactccgtctaataaataaataaataagaagctttcttattgggcaaaatatagtacctatgtacagaaccagacagatggaaaaaaaaaaagaaagaaatggccagcctgcctccatgcgagttagaggaaaatactgtttttgatatcttttggttaatattcatacttgtcttaaaaaataaatcaactttcttccaataatgtgacttgaaataacttcagagtgaatgtaatatgaaccctaaatgttcttcgtctttcccctgacacattcaatcatgtcataagggcctggaaaagctgccaggaagtggagatgttgtcattcttgttcaagcttagcatcaaatatgacccactccagcttggaaacatgaatttgattaacggttataatctaagtaacttcattatgtaagcataataacccagctgaggagatattttagtatgtgctaagaatttgttaattcctggctggaaaaatcattttctttataaggattagagctgcccagtaggcagcctcacttgccgaaatcttatgaacaataagtatttggacaggagaaatttttgattctgcagcagggataatcacacttggtgtttctgtggggccattcttccaacaccctcagagggttcctctaacataatctcattaatcctcattacagccttaggaggcggcaggtctcattgttcttacagatgaggaaacggagatgaaactgagaggcagagaccacaaacagggaaaatactgcttggcctttgaatggcttgagaagaaacaggcaaaaagactcaagccattttctctagcaaagttctacagactctaaaaaataatgttttgtacaccagtgttcacaatagccaaaaggtgaaagcaacacaagtgtccgttgacagatgactggattaaaaaaatgctgtgtacacatatcttgaaatataattcaggcttagaaaagaaggaaattcagacacaggctacagcttgactgaaccttgaggagattatgctaagtaaaatgagccagatacaaaaagacaaatactgtatgattcttcttataggaggtccccagagaagtcaaattcatagagacggaaagtagaatggtgactgccagggcctgggggccaggaaaaggagagaatagggattgtttaagagttgccaagtttcaggttgggaagaagaaaaagtttgggggatgaattgtagtgaaggctgtacagcaatgtgccttgcagctgagaaaatggaaatttcaaggactttatggggagtctcctgtaaatggactcaggccccagaatgaggggcttccaagggtgttctgatttgaagacagactaagaatgtactttgtccactgaaagtgaccaaaatgaccaattttttgttatgtgtattttaccaaaaaaaaaaaaaaaagaatcctgaggacagcaagtattcgctgtgactgggaagatactactgtgggtgttttttgttttttgtttttttaattttactttaagttccagaatacatgtgcagaatgtgcaggtttgttacataggtatatatgtgccatggtggtttgctgcacccatcaacctgtcatctaggttttaagccctgcatgcattagatatttgtcctaatgctctccctccccttgccccacccaccgacaggccccggtgcgtgttgttcccctccctgtgtccacgtattctcattgatcaactcccacttataagtgagaatagtcagaatggctattattaaaaagtcaggaacaacatatgctggcgaggctgtggagaaataggaatgcttttacactgtgggtgggagtgtaaattagttcaaccattgtggaaaacagtgtggtgattcctcaaggatctaaaaccagaaataccatttgacccagcaatcccattactggttatatacccaaaggattataactcattctacaataaagacacatgcacacttatgtttattgctgcagtatttacaatagcaaagacttggaaacaacccaaatgcccattaatgatagactggataaagaaaatgtggcatgtatacatgatggaatactatgcagccataaaaaagaatgagatcttatcctttccaggggatgaagctggaagtcatcattctcagcatactgtgggtgtttttatggctcccaggtgatgtaaggaatagggaccacaggtttaatgaaagataatcgtgatgtattgagtggcttgggaagatgttgattgcaagtggattagtcacttccctcattaaggcttgcctctgtacccattgccttcatgatgggcagagtgggctccctacttcagattccagattgtggttactcatatctaagtcttatccaagagactgccctctcctcagctcttcttattcccctcctgctcaaggtacctgggctgtttctttctactggaagcagtagaggctgcctaggaagtggagtactgtcctgacattcagggacagcatcatcggtacaagaccagtccagtcccacaagccaaagattatctgcagccgccatcttgaattcttaacaattttgtctttgaaattgtgttttgcaagtgaagtccagtgtgacaatggagcatgaacagggtatgtggagccacagctcccatgtcatcccacctcccactgcctctccagaataggttttcagctgttcactttcctgccccctggagccccaggctcccctttcctgcaactgcccagcaatggctatggtcatccagtccatggggatctgggtaagtatgtggagaaggtcagagacagcctcctgtaacatttctgggtgtggcacccctccctgcttctaggtggcagtaccagagagtttacagaggatgaccgggcagggtgggtctccaggtcactgaaggtcacctattcgactgagagaggcctgactacacgtccccaccctggcctgggtatgatgatggtggggatccaggcatgtggtggggcacatgagtgtgcatgccaagtcacagggctgttactgggagttagggagggtcagcacttgaccagccagtatcaccatgccagaggaagtgggatattaaataaaaaataaaggccatcatgacagagggagagagggagaccacagaaggaaggaaaaagctttatattttagaactttaatggcacctttttcctgctttttgaacaaaagcctccatattttcattttgctctgggtcctgcaaattgtgtagccagtctcgtctgcttaattctacaaatatgcaataggcttgcgggagatgtttgggtcttgccttgcagctgagaaagtggaaatttcaaggactttatgaggagtctcctgtaaatggactcaggccccagactgaggggcttccaagggtgttcaggcttgaagacagtcaggctgtcagatacccctgtggtcagacactctgcacccttggcctcctccgctactataagggaaagaggctttgcacttggaatcagaagacctggattctccttctagatcttccatttactagttgtatgactttaggctaattacttagtttccccatcctaggtaattataggtaaatggaattaagaatcccttctccactgagaaacacatgtgttgctgcaagctcatgatatgaaaatgatctgagacgtgaaaggacagaaggacagatgcgttattaactaactgtgctgctactaccatttagctttccagaccctggaggaaggaaggaggaaagagaagggaagagaggggatgggaaagattcatcactttagggattaatgaagatcattttactgtattacttttatggtaatattgattttttaataaacttactaaataaaatagaactttgcattagggataggagagaggcaaggggaataggtctagtcatttccagtcttaaaccccctagttctctgtttccttacttagaaattaaggagaggctgggcgcggtggctcacgcctgtaatcccagcactttgggaggccgaggtgggtggatcgcaaggtcaggagatcgagaccatcctggctaacaaggtgaaaccctctctctactaaaaatacaaaaaattagctgggcgtggttgtgggcgcctgtagtcccagctactcgggaggctgaggcaggagaatggtgtgaacccgggaggcggagcttgcagtgagccaagattgcgacactgcactccagcctgggccacagagcaagactccgtctcaaaaaagaaaaaaagaaagaaagaaagaaattaaggagaaaggggagaagatgtcaagtagaaattaattccaaaattctcttatattctaatctttatttttgcccatttaaaggcggtgtttggtgtctggtttctatttgaccatctgcatagacctttgttaatatagatgcaaatccaattaatctgctggaaatgttttgtctatgtgtctcacttctatttatagcataatttagaatcaacttaaaatagtactcatgtgtcttgggtcatttccatggctagtgtttttattccatcatgtcgtatggctgaaatacttatgcagtatatggaaaagttcttagcacacagtcaacactcataaaaattagctattgttgttattatggcactgtgaaggagaaaacagaaaaaagcaggagacagaaatagagggaggatgaaacagaagaaagagaggggaaagtgaagaaggaaggaagggaaaaatgaagaaaaaattgggagggaggaacagaaggatagagggaaagaaataaagaaaaaaggagaaggaggggaaatggcaattagtgggggaaaagaccttggggatcatcggattgagttgtttcaatccaggctgtatattttaggatcgtctgggaaacttaaataaatccatgcataacccccacccccagggactctgagccaacgtgcggtggggcctgagcactggcctattttaaaggcttctaggtgattccgagatacaggccaggttgagagcccgtgatcccattcagctcctctatgactcaggtgagaaagccaaaacccaggacggccaagggtcctgcccagtcccagcggcaggaggttggagtcagattctctgctcccaggccccttcctcacctttccttttggtaagacatatgtgaggggcaccactctaccccaggcaccacctaaccccacatcacctctgcaggccagggtgcggcagttcctttacctgggacaccaggaggccagtgggtctgcaccctgagctgcagaatccaggcaggtggctgccatcttacagctcgacctttgagacccacgctgatgtatgtgtttacccaaggtagttttaaaatagaataataaaaaaaatgtattcagtaaatcttgataacaaagaaaacacattttgattcaacactgtgcattaaagtgtgaactgtggaatccaggcagtagatacatggctgattggcttcctgtatgtttgaaattttttcataataaaaatttgggaggactggtttaaaagggacttgaaaaaatagctttaaaatgtgtttatgtcccagagcatctccttcttttgacctcccacccgggaaccctgtaattcctgcctcagtttcccatcttgggcattgggccaggtttatgctgcctcgttcttggctccacaccctcctctgccatatctgctctgaatgcctggagggactgagaaacttcccaggatacagacttcctgtgttaaaacactggaagtcctggacaccctgggacagttggccatctcctatgtttggggtgatcatgacgatgatggttttcaaataggaccgatcagagtcagatcctgatggactcctgtatttgggcatttgacaccctttcttctctataaaatgaaagtattgagccagatgcttgtgacaggaatcttgtctcattcgggattatccaggctgtttggtactttctcctgttttcttttcagttgttttcttttcaatctgttttcttttcagcagaaccaggtaggaacaaaaaccataaaaatgtataaggattaattttgcattattgatagagtcattaaaagacttgagagtaaagtttggaaccagtctttaatatcagtgatttattgatagaatttttcattctctctgtatcctagggttaaaaaattaagatattcatcaatttatcactgaattacttgtcaaaacgtacagtgacaaactgttcatattttaattatttaattaataaataagggtttactttcattgataaagttaattattgctcttagcttaatcttactatcttctcagtatctcttgtacgatgggaacaccctttaaaattattaatatagtgaaacactctcctaagtattattctggtaaatgtttaacaattagctattgagggggagaggatggagaaagccgtgatttctagcactcgccaatttcagtggtataaatactaccaccattgccaatttcaagctaaatgggaaagagacatgactgcactgccaagctgggcagagatgtgcacaatcagatctccctggccaatgacagcagctccactacaccactgcatctttatgctgcaaaaaagtaggtcagagggatgctcccttatatcataagaacacagatttactgagcattaaggatgctgttagataatattatagtttatgaagcaaatttataaattgatatgatgtaaaacagcaccttcctcaatgggtaattttgcaagagaggcacgcagcacacaacctttggacaaagccttcttgggtctggatctcccttggccctgctagcagggtttgcccacagcctctccttggtaccaatccctgttaaattaccccatccatttgttatgcttcagaaatcctcgcaaaaagggctgctgtacagacatgttgtcatctctaggcatccataactgtgacaagtgaaaaggtcatgccttcaaacattagcattgcaaagaagccatggtaatgattcattttttcctttccaccattactttaaagggctgaaaatacttgagctggataggagaacatgggctagtcagagcatttctctctaagtgctgaatttaataaccagaacaaaaatacccattttagtagggcactctttcaaagtagaaatctaaataaaactgaggagtattgtgtgcagattaagatgggcaagtcataaacaaaccagaggtctatggtttggccaaggtacttctctcatcaaatgcgataaaacttgtgattatttttttaaaaaaggaaaagagaagaaaacaaacaagtcctcaaaacaatgctgcagtttttggagaacagttcttccagttggtggttttaaagtactagggaattacattctgggtcaacaccagccttggagctcctagaataggacagaaacccttacttcagaattggcttgctctcattggaatatagtcagtgagtgttaaactaccctggatttgggaggtgatgatggtgacttaccaagttctcaaaggaaaactgtctgtttttatgtcttaccattttatacatttcctttttacaaacactgcaaaataggaaatcctgaccatagccttgagatgcccaggagactgggaggcattaaacatggattgattttcagttttgcaacaagagtttctatattttattctaaggatgagggtgttgcaggaatcaggacactcatcaggaattggggcgtgggggttgatggtagtggacaggggtcacctttcaaagctaaattatatgtgggtgtcatggtttctgattcacattccccagtcgtgagagaaagaatgaggagtaaatattttcttgttcataggcctgtaatttatttattcacagttttgtaatttaggttacttttgttggctttgagatctctaattatcttgagttagcctctttcccgtatgagaaaaaatcttgattagtggattgaggccaaacagaaagtgccaccaccttcagttcctctgtgatggcagatccatggtgagcctggggtttctacagccagtaagcctccagctgtcgaggaacatgccagctcacctttttataggtgcacccaatctctactctttgagttcccctgttgaattcaaatggttgaacttaaattgttgaactcaaatggttgaaagggaatgttcttgttccctcaccataaatgctgaatcttaacacctcctcttattccctcttctctctccaatctccggccacaagagtgcaaaatggtgctgccacttggtcaaacagtgtggcagtttctcaaaatgttaaacatgaaattgccatataacccagtagttccacttctaggaatctctcctggaaaaaaatgaaaacatttgttcacacaacagcttatacaggaatatttatagtataattactcataatagccccaaagtagaaacaaccccagtgtgcatcagtgggtgagtggatttaaaaaaatgcagtatatccgtgtgctgcaatatcatttagcaataaaaaggaacaaagtactgtgctatgacatggatgaaccttgacaacattatgcttagtgaaaaaaatccagaaagctagatactaaagaatacatgctatatgattccatttataaaaaatgatctaaaaaggtaatacgggtattgtgttagtctgttcttttaaagacataccagagactgggtaatttataaaggaaggaggcttaactgagtcacagtcctatgcgactagggaagcctcaggaaacttacaatcatggtgaaaggggaagcaaacatatgcttcttcacatggcggcaggaaggggaagtgcagagtaaagggcggaaagcccctcataaaaccattagctcttgtgagacctcactcactatcacgagaccagcatggaggtaaccacccctatgattcaattatctcccaccaggcctctcccatgacactatgggagacgaattgtatttatggaaactacaattcaagatgagagttgggtggggacacagccaaaccatatcagggagagaaggtagattagtgattgcttagaacttgagggggaaaagagaaatgactgcaaatgggcaggagaaatcttttggggtaatgtaaatgctttaagatttgattcagtgatgattatacaactgtgtatatttgtatacaggttataatggtatatatgtatatgtactggataatataaatatatttgtaatgggttgaatagtatccccaaaaattaatgtccccttagaaccttggaatatgaccttatatggaaatagagtctttgcaaatataattcgttaagaagagatcatactgcattagggtaggtcctaaatccagtgactggtatcctcataagaagtccatgtgaaaagacacagaaacattcaaagaagaatgtaaattatgtgaagataaggcagaagctgaagttttgccgccacaagccaaggaatgcctggggccaccagaagctggaagaggcaaggaagggtcttcctctagagctcttagagggagcatggctctgttgtcgacttgattttggaattccagcctccagaactgtgagagaagaaatttctgttattataagccacatagattctagtaatttgttacaggcactctaggaagcgaatgcaatattaagtgtacaactgaattgcacacttaaaacaggtgaattttatggtatggatattataccacaataaagctattaataaaaataaacatttttatttattttataggctaggggaagggggggatcagaaccaaaggctggggacagtacagccagttttgctgcatctcagaaatgccagaaaaggaatttcacaacagttgtgagcaactgtccttgatatgcaggactcttggcacctctttcttgagtcaccaatttgcctactttccatcttattacacggtcagtgctgtggggcacatctctgccacatggctgctgactctagagaaactcccaaatgtaggttcttctgtgggtgttcaggctacggaactggtagtattttgacgtttcattatatgtctcaaacctctctagtaagccatgggaaaagacatgacccagtatgtgccagtcttagaagaagccacagtgtttctatggtcaagtaccttggaagtcttacgaggcaagcaatcaagtacgtagtctgagcttgacctcagaaatgggggaagggagcttcttcctgtgattggggaaatgagataaaaagcaaataaaaaggttgttatgttttgatgaattttcaaacctttctagtcctttttgttaacatcttgttcctttatcatatttttaaaatatctttaaacattcttgcatagttattttgcagtctgtatctgacaactgtatcatctgaagtcctgggaggctggttctcaatcatggtgttagttttctcatgtgttctttagtttcagtttgtgagctcacggccagcagggctttatctgggtgcatttcagtgggcctggacagaggacacattcttctagagtatgttagcttttgctaggctcctcaggccattatcaaattacggtcaccttcatgttaaagctttagcatgaatttgactacagacctatgtagagtcaggccagttttataaattctcaggggagagattgtttttctacatatataacacaagctgaggcagctttcttctctctttgcctttgtggatttttatttattgttattattattttggttatatactttctgtcaagatagaaccctttgaggagcctggctttggaggtctcatatttaatgtcatgcctctcaggtagtcaaagcaccgccattatatattacctctggcttttcactatcagcttttgtgtttggtctctggtttttctctcactttctgataagcttagtatgcattttaaaaggtgtttgtcatatgcagtctacaatttataagtggcttgtggaattggggtgggatcttttgtcatctattgccaagaaaagaagtctatgtattagacttcttttaattttgatgtgggaaaaggaaacttgagaagcttcacaaataaagggttcccttttctcagtaaattggagacgagattctctgctataagttatggaagaaggacaggtttgaggtctccagtgactgataaaggtttgcaaggtttataacaactgtgggagatgggcattgtgaaaagtggttacaaggactggttagcagcaacaagggattcacctaaagttgactaaaagtggaagttttatccccattgtttataatgatagttagaaaccagtaacatcattgtattagtccgttttcatgctgctgatacagacatgcctgagactgggctgtttacaaaagaaagaggtttaatggacttacagttccatgtggctggggaggcctcatgaccatgatggaaggcgaggaggagcaagtcacatcctacatggttggcagcaggcaaagagagagcacttgtgcagagaaaatcccatttttaaaaccatcagatctcataagacttactcactatcatgagaacagcatgggaaagatccgcctccatgactcaattaccccccaccaggttcctcccatgaaacatgggaatgaattatgggcatacaattccagatgagatttgggtggggacacagccaacccatatcaatcattctgggtgtgctaagggacataggccatagccctcaacagggttggaagagcaacgtgccgtggatatgaaacggcatggcaatttctgctgagggctcacttactcaagtttcatttttctggtgcctttcctttattttgctcgagattctcatgcagcagtttcttgaataaatttcattttgaagaaatatctcttgaagcatggtttacctgagtgttttgccagggaaaatcaagaaccctgctttgctgaacaagttgtgtcccttttgctttttcagttcctgcgatgataacatcctatccaaatactaccctggccacgcaggggcagaaaaaggagatgagctgcacggcgcatggtgagaagcccattatagtccgctgggagaaggaggaccgaatcattaaccctgagatggcccgttatcttgtgtccaccaaggaggtgggagaagaggtgatttctactctgcaggtaaaagcatggcaaatacaacacaatggaatgaactttattggaagaataagtctttcctttcacagaagcgggtgcagataagtagcagataatctttcggaatttatttacgaagcactatttctctcccctttcacacagcgagattagtgaagtagccttcaaaaatagtgcttcagcctaagtgttattaagaatagggttattatgaacgcagcagggaacccaaatgtagtaaaaaaaaaaaaaaaaagtgagaaataaggtttttaaatgacagttaatccttcaggaatgatggcctatgctgtgtgcatgttttaacttcctgcaaaaagaaaaatgagatgggctttgggacaaaaatattatcataaaaactatcttgcttctttggaaaaatccacaataaaaaaaaaatctgtcgttaaaagaggatcacaaaagctagagaaaaggactgtgagcagtgaactggtttgtgctgttgtcatgcggttggaggatgatactgtagcacacacagggtggggaggtggggaagccctgtgtttgaaatgcttatattggctctcagacaagggtccattcctggaatcctcctagaaaaggaatctgatgcgagtcttgcgggcccccagccctgcctgcagtatttaatctgtctctttaggcatggttgctttggataccatgaaaaaaaaaatgtatatgtgggatatatgtcaagctgaccacgacatcttatataaattacacatccaatttaatgagctacacctgacatggataatgtacgtgaatcctatccatccgcctactttcaattacactgaaataatttgtcctcagagggatacgtgcatgtgtgtgatttagtatgtgagtctggaggaatgggggttttgtgagtgtgtgtgtgtgtgtgtgagtgtacctatgtgtgtgcttggcatggcaggagaactgaaagagtggagagagagagctttacggctcaaagtcattttgcctactgaaaaagatgaatttctttctgctttacacatagattttgccaactgtgagagaagattctggtttcttttcctgccatgctattaattcttatggggaggaccgtggaataattcagctcacagtgcaaggtaggaagacgatagcgtaagagaataaacacagtcatttcaggatgggagctgtatgctcagcctcaggcatctctgtgtcctcaacttgccatgtaacacttcctaattcccaggaaattttgaatatgtataatgtcagtgctaaagcagaattttgcagtgcctgggattatgtcaaagtaaagcccccaaacagggaacgaagcccttagaggaaccagtcaagatgacaagcccatgacagtcaagccacatgcacacaagtacagcggtggaatttctttgctcaattttaggaatccatgtactagatgaccagaatgaaagggaagtttaacatttggggccaaaatatgttttgagttagagatccaaactagaatcgtgacattttatatcctccaggcttggtccagttcttaagggctatgaaaattggaagtcttgggaaagtggaatttctcttccctaaaatgtgattaggaaaaagaaaatgcttccaaataaaaagcttctgttcttgtctaatgcagacaaatcgtttgtgagtcacgctcagcatttccactagcgttttatgtcagagctctgtttgaactaactcgtagtctttctgttgatggcacagagcccccagaccctcccgaaattgagatcaaagatgtcaaagcacgcacaattacgctcaggtggaccatggggtttgatggaaacagtcccatcacaggctacgatattgaatgcaaaaataaatcaggtaagttctttacttcctccagcttcccttccacctcagaaagttcttttatttttctccttattaatgtgttttacctgtaagcgcacagctcagctcacaggagctcagagggcaccacttcccccagtctccttgctggaagcacatcctggctttctgctgtgggagtggagtttcgtgttgaggctcagctctgcttctttcttttttagccagcccagacttcagtcttgcttcctgctggactccttgatattgcagcttcctgttggcatgtgggcagtggctgatggagacaggcccccaccatgaccttttctatttcacctgctcccttcacttcccgtttcccgagctgggtgacttttgtagagcctgagcccatgtcctgcacccagagcgttgagctcaagctgtgcttggtgttggtcggataaactgtgcagtggtggttggtgcagaaaaaggaaaattcactctggagcaacctcctggaaatgctcagggaccatcggcgacactggctgctgcacccaggaccactcggcccagagcccataaataaaactgaccctgctgccagggccgctgcaggtgtgcccattcattgccttcaaggaacaatgcccgggccattttgaactttatgatgcattgggcgagggtagaataccaccacagtggcctctagtcagaatttttactgtgtctcataaaagatatgaggaattcgagcaccaccagcatgggaagggttaataaaatccttctaggccgcaaaagcagctttatttttcacttcctggataccgcacgttatttcagattacccagttgtgacccatctaatatctttggcactaaagctgtagtaaaaaatcaagctcaaggcagctgggaaccacaggtcaggagtgaggaaatgtttcagcaagagcaagccaggaacagagccaggaaatggtgactgcaaaggcaagccgaggggtgactcttcgggaattcaggagaacagaatttgaagattgagaagatatggatcaaaacaaaaaatagtgttttgaaaagtagtatctgtgactgctgggttggaaatgcacatgaggaaagatggaatggctcaggtcatcggcctctgagttgcaactgggggcctagaagtgaggtgtcacttacacaaagtctgaggaagggccttccggggttgattggactgcaagtctcaccgtagccaagaaatgctgcagagccagggccctgggctcaggggtgaggcacagtgacctggggggctcacccaagacagtgctgagctgaacaagcatcttttggggactaggaccaacaggtttcccaagggcccagggaggagaggctgaccttgcctttcttacaagttcatgtatacaggtcttgaagtgaagcaaatgcttcttaggtgaggcaggcacatttgagcagaaactgtcctggaacttagtgacagtgatgagagctcagacagatgcagtgagcaccgtggggacagggacagccctttatctcactggctgcgcactggctatggggctgcaggctgcccatgctgttggtgcgggagcacacaggagacctctcctactggagcagcccaggacctcccctgtcctcatggaggagcgggcattgccggatgctggtggcaggcctgggctcagtgatttgggacccagcctgtgtgggattcgctgctgggcctgcgttgcaccagctctgcaccctcgcttgcgcatctcacctgtgaagtgggcactgctgcatccacctcaaaggactggcaaggagaccacaaaggccaccagctgccctctgcctggagtcctcccttccctgagccacccagttactaccccctccatagatctcaattctcaggtgctcacccagctccttctccctttcaatctgggcaggtggcattatgggtcactatatatgtatctctatgattactgacaaatatgctgattaatgcatttcacctccaccacgctagaggctccttgggggctccctgcacctagtaggtctattttcacccagctcatttctccaacacccagcaccgcacccaacatgtggagacactcaatggaaattggtgaactctaagaagggaagacattgaaaacgccttcctcgttgtctggagcatactcaacatctaataggtggtagcttgtagattgctccagcatgcaggaaaatacttaggagtaaaatgcctctaaaaccctctgtgttaaactacttactcagcatctaagtgtcctcactatctccctactcttacccaggagtttcccaaaggcagggactctggttctctgtgtcctgggatccccagcacccagcacaatgtcaagtgaagagcatactgtaaatgtttattgcattaatttacatgcaattgaaatctaagaatcattattatcaacagcatctttaaatgtataaattgatcatggtttatataaccaaagcaggaaagctccttgtctataaagctgagtacaggcgggattgagggatactcttttccatccttcatgccctacttcaaccagagacagggccagtggtgtggctaagatgtttatgtagccctggagcaagtcattttaaggggcagcatgggtcccaggagaaaagcccacaggacaagcagatccaagtccatgaccaaggtctctaccaggaccctacagaacttcaattactttcagtttggaagccctgggaggaaggagctgtgctgagagtagatagcacctgtactcactgctgtacgagttgtgttagtcagatttttcatgtattagtttcttcctccagaaatttttggtgtataaaaattacaaccataatttaagtgagtgtagttttagactgagtacatagaaaactgatccttcaagtattaataacagcctaaatgtcacttcttccaggaagccttccctgactacctattccccttcactattcatagcatgtcttggaacacttggtgggcttgtgactattaatttactatctgcaccccactgaacagttgtccccctatgggccatagtgagccctgagggctggaattgtctctgacaaaccttatgctatgtccctgtgcccctcatagtgcctgacatgtatacgagactcataataaccattagtcaaattgttgactctcaacatctgttttaggcaacggtgaaattatccccccaaaagttttcctttccttttcattaattttcaaagaaagcagcatataaccaatgtattaaagtacttcacattcgtaacagaaagaacttctgcaagtgaccattcactctatgcttgaacaatccgagaaacagaaactcactaacccagggagcacagctctgcctttggccagctgtgactgctacaagttcttacatttattgcaccaaaatagaccttcctggatccagtgtctctcctcccacctcttaaccctttggccaaatgacagtcctcccaggatttgacaacagatgactttccttggtttactcttttccaggaaacactgaacaccccaagtccttgttattgtatctcctgtcatcatctcctgcccccctaactctggtcatgcccagtggcagcaccagaggcgtcatctgagcgggcacaggcacagtgaagctgtcccttccttatctggaacattcttcttctcccataggtggcaattacacaggttgccttggttgccatattttctgattcccagggactactgcttctcccctacaaggacccaaggccacctttaacatcccttcgagcatattgtctggggacctccagcagattcgtctgcagtttgttgcctccctttattcccttccttggaaggcagcctgcccttcagagtctgttcctgtgggggccatctcctgtccgcaggttctcttgttgcctctcctgtccacggtttctctggtaaccccccccgtccacggtttctctggtagccccctcctgtccacggtttctctggtagccccctcctgtccacggtttctctggtggcccgttctgtccacggtttctctggtaaccccccccgtccacggtttctctggtaaccccctcctgtccacggtttctctggtggcccgttctgtccacggtttctctggtaaccccccccgtccacggtttctctggtagccccctcctgtccacggtttctctggtggcccgttctgtccacggtttctctggtaaccccccccgtccacggtttctctggtacccccctcctgtccacggtttctctggtacccccccccgtccacggtttctctggtagcccccccgtccacggtttctctggtaacccccccccgtccacggtttctctggtaacccccccctgtccacggtttctctggtaaccccctcctgtccacggtttctctggtggcccgttctgtccacggtttctctgctggcccctcctgtccacagtttctctggtacctccctcctgtccacggtttctctgttggcctctgctgtccacagtttctccggtgcctccgtcctgtccacagtttctcttgtccctccctcctgtccgtggtggctcacaggtctctgaccaggtttcagcaccatggcaagctctgtcacaccctgaaaggtaaccaggaaacacagactctgacacagaaggtgcacaccccaacccctctcctctcttggtcttcccacccctagttcaccctgaggactgttatccttgagaagaataagacagagaacaaggggctctcctgtgtccccacacctcctcctattcaccaacatgaagggcccgctccctctcccagctacctctccattgttaaacctttcatgtaattcacctccagaactttcagtcaccttcactcattctggtctttagcctctaacagcacttcttcataccaagtccactctcttatattagtccttgttgctcttgcatccactggatttggggtatctgacccccaaggcgagctccccagcaagcacccagcgcagtctcactggctcctgtcagctcttcactccttcctcacctcacagaggctgcagtgggactctgaactgccccatcctcctacaccaccagtctccctggagcaagccatggcatcccgcccactctttcgtgaatgcttctgacatcttcctaaaccaggctgcaactccgagcctatacagccctctcagtcttcctacaaacccacagatggtacagtcattcttggccaaagttttcttctcttacatttgaccaaacgatttctgtgcattgtcaagtcaataatttgccagaaggtcttcttctaggcatacgagattttcagcaggtgcccggaaatatcaaaatcctgtcttattaggtgttttcagagagtatgtggaggtcatgcattacagaaaaatgaccttgaacttggagataacacaggcgaggccaaatcccagcccttcttgttaccagctatgtaacagggcttgagtttcttgactttcactaaggaaataaaaaccttaccttgacaggatgttgtacaattttaatcaaatgaagcagtctgtccaaactatacatcggaatgaccaagatagggagcctttttaaaagcacaggtttctgggcaccattccccagagactctggtttggtaggtctgaaagcagaattatcaaaaagccccaaggtgtttccaatgtgcccacagatttggggccacagaagtcacgtttgaaaatgcccagcacattgacctgatgggaggaggaaactgaaaattgagatataaatataactaggaagaatgcaccattgacccaataaaaaagttcttaggcgtaaaacacaaacagaaatgtatgcatggacatccaagatctgaaaagtggcaagtgtgactggggagagtctgggaaggccacggacaggagggtgaggatgggctttgtaacgggtcccccagcccattggagggagttagtggtagttgctacagacagggtgcaaacgcagcatcagagaggatttataagtcacactgggagactgttgaacaaggtgacatcactgagataggggctgagctaaaggaacctatagggcatggatgtggaggtgcccagtgaccaccaagaggggactgtccccaccctacccaggtccaccatatgccttggattggtgtaagggactgcagtcatggacactcatatgcctctccaggctgcctgccaactcccagacaagagcctccagtgaagatggctgtatcttcattggccccgtcagtttcagaaacttcaatgttgcctgggcagaggcatcaaccaccacaactgcctacttcctccaggggctacttagcaaatgtctctgcatcttgtggcacctggcattcctcctcatcctcctaaacatctctgcagaaggtctggctttctctctgtgggacaagcctcataggtgtgtgccgtttcattgatataaaatttcctctcctcatttgtcttccattgaatcccattcttccccttgtcaatttttttccaactctttgtatttcatgtttttccacctctaatcttcttgaccccaaatatgctttttccttctaactgcaatattcattgtcagattctattaggcttcattctctgagaagttacagtatccaaaagcagtctttaagccacatattttttcttcaattccagaaaatctcttgcatttatgtttaactctggacagagaagtcccctaaactgccatactcacccttagtgtgacaaagtgattggccccattcccaagactcagaggtccatgtatttgtggtttatttgttcctctattaaacattcatgtactatttgtctactatgagccaggcactgtgctagcactagggataaaagactgggtatggccagcatggcctctgccctcctggagcttaaagtctagcagggaacacagattcagattatccatggaagacttacttgtgtggtgagcaccaccaaggcagaccctgaggagggtgggaatatgtaggcaccatctctgtctactgtcttgggccctccttttttcatccccagccaataccagctgtcgaccacacacctacagtcaacaactgcccaaactcttttgatataagaaccacgtattgacattctcatccttgcttgaagcctgaaaaccaccagatacaaaatgtcacagattcagtgataacatttcacacaaagtaggtgctgctgttataattagctgtggttgaaaaataattcctacaaccaaggatttggcactaaatgatttcaaaaaatagaactgaaaaaatatgtttggtaatcaggatttattctggaacttgagattggtttgtatgggattatcttgtttttaccacactctatttggggaggaaaggatctgatatggcttgaagttttgctggttttcaaatgccagggattttgggggggcccaggggtactatccaaaccatagttcattgtactgtcctatacaatgagtgcttacagtggccatcgtccattccactaacctgagcttccaccactggaatttgccttctgagatctcccccagtcggctgatctgtgcttcctccatcacccctccctgaactcagctggcttgttgccccatgtccctcgcagcgtgaataatgtgtgtgggatgtcacatcccctctgatggccaactctgccagaaagctgggaacattgcattcagaaatcactttgagtgtaatttttctttctttccgtctttttttttttttttttttttttttggtttttaattcctacttgtgaactttcaaaggcagaggaaaaaaactcacgtctctatctcttcttttttgaaaaacaaaacccaaaagactcctgggattctgctcagagaaccaaagatgtttcccctcagctgaactcggccaccatcattgatatccacccttcctccacctacagcatccgcatgtacgccaagaaccggattggcaagagcgagcccagcaacgagctcaccatcacggcggacgaggcaggtacgtgggaccgggcggaaccttgctccagaggagcccgggagctaactcttgagggctcagatgcttaaatgcagaagcagacctttgcccgtgctaggcggaggtctttgatgcgtgctctccgtagttctgtgccctataaaaaacgcagacagcgctctgcatcttactttgaaggcactgctcttcaaataggatttagttcaagtttcccatacccaagacttaaaagaaagacgtatgaggctaacaatctggtgagattcaaagaatcatgccgttttacaattcctttgtttggacacatggaatccaggttgacaggagaaccgtgagtgtgtttctttcctgagaccctgtgaagtccagtgtgggaggaagcagtaatgcttaactaggaatctgcaagcatgcttactgtgcgggagatgtgggaaggggaacagattattttattgactagaaacatcaatatttaaaaataatgtttttgctcttttttctattacaaacaacattatatttagtgttgcaaattcagaagatagagataagcattgtggagaaggcaaaacagcttccatcattttcccactgagagctaacccaggaacaggcagtgataactggctaaataatttcatcacccacacacgcacatgcacacaggcacgcaccagtgtattcacaccccttaacacactgcgagccactcatgtttccgggggggtgaaattaacaggtgtgcagagaactgagcaatcaggcaatggtccatgaatgctgattgtcagcccgcctcctggcaggaggagaggaagccactgcgcttgggtttcatccacaaggattgcatgcctggcccatttattgtagggaaagggtgtccagctcccaaacctacctcttcttttcctgcccaccatcagagcaatcagccactccctactgcagggaagatggcagcttagtctcaagtccctgtttctccatcaccaagattaaggtgattgccacacccagatggctaacagaagaccggaggtttgttgcaactttcaagagaggttgatcttggcttccttcccaccacctcatctctgctaccctcattaacagcatcccaaatataaatggagcttatgtatctcttaagtacttttctacaatttgtaatgatatctctcactatgtgtttaacaaatctcatattgccaaacgggtcaattattttcgagttttcattagtataaacaccactacaatgaacatcctggtggtatgtcttttgctatctccaagatcattttcttagattaaatcctaagaagtcagatggctggatcaatcaaatgcaacattttcacccttctgatatctgtaatcagtgttgtcttcaagagaataggttaaaatgtacaactcttcctgaactgcagaggaatgcccatttttcaatgctggaagatgtcagttcttgaaaattgttttcaagagtgagtgacagaagatctttaggctgaagtgcctgagagtgagccatttctgagacttggattctctgtatgatttctcatctgcaaaatggacattatgatgcctttctgctccttacacagacatatctgatcactgaaaaaaactcaagctctgaaaatactttgcatgtctcagaaataagtgggaaataagtgttaatctgcttctgcaaaaaatagaattgtatttaattatgtatgtaaacaacccactaacttcctcagatccctgagatttcattatgctgggtacttagggagaataagctgtccccatccttcagcccaaaatgtcatctctgacttcctgctcaatcttctccttctctctcaagcccttttctaatctcgccccatcccagccacctcctcgggaaaacagcatttttccggtggtgcattttgcacctgcttttctgattgccattattaatgctgctgttgttgcttttttcttcgtttcctctgtgacctctgctgcggctggcagttgccatggaagcagctctctccctgccagaaggccaggtgaagagcctctggggtgctggtctgcagggcagctgcctggcatgtctgcagacagatgcagatgctgcctctttggctcccaggctggccttttgtattgtatctgggtgtgctggctgtggcagccccacacagcccctctcctttaatattcagaggagctaaggggaagggaaggaaaggagcaggttctagaaatgaaaagctacagcagataacttgtctttgtcttggttcataggtttgcatgactgaaattaaaaagtcaatttcccatgtgtgacttacctagaatggggtgctctggccaaaggcatcctcattagagtattgagcaggggctgtagacactgctgccccttcccagcaggtaaacccaaaggcacatctttttaggagctgtagctgtcttgaggtgaccttgtcccactgttcccttattcctcatatgggagcctccggaagctgtcagcccactcacttttactgtaatctagtacccaagtcttgggcacacgaggatgccccccaatgctactactttgcaatgacacttagtgactccccagagcccaatgcccagcactcacctgcctttgcatgctcccagacccctattgttgtgcttcttcccctgtcttgaaggcactacaagttccatgtctccttttctgtgcccttccttgaaaagtcaagttcaagaatgccttcctccctggtgcaatgcctttttccatctcccatgtgtagttagggactactcagctcaggacagaggagggattttgctgacagtagcctttgaggtgtatcatcatgtcttcatggaccctgctgtccatgatgatataccacctgatgtggaggggctgtggccccctccacatcagggggcatatgtgcttacaattctgtcccttgtgtgtgtctggcataagggagatgaaagtatgagatgaacgtttataaacattacccacagtattgcctttagaatgggtgtcacaatgagcagagtatgtgtgtgtgcgtgtgtgtgtgtgtgcgtgtgtgtgtgtgtgtgtgtgtgtgtgtatgtgtgtgttgagaaaatatatgctggattaaacccacagtgaaattctgaagggtgccctggtctgaatgttcatgccttccctttcaaatgaatatcctgaaacctaattcctaatgcaataatattaagaagtggggcctttaggaagtgagggtggacccatcattaatagcatcagtatgcccttatacaataggcccaaggcccaataagatcacttaccccttctgccccgggaggacatgggaagaaggcactatctatgaaccagaagaatgagccctgaccagacaccaaatctggcatcttgatcttggaattgtcagcctctagaaataaatttctgtaagaaataaacttctgagccaggcacggtagttcacgcctataatcccaacactttgggaggctgaggcagggggatcacttgaggtcaggagttcgagaccagcctggccgacatggctaaactccgtctctactaaaaatacaaaaaaaaattagccatgcattgtggcacatgcctgtaatcccagctacttgggaggctgagacaggagaatcgcttgaaccctggaggcggaggttgcagtgagccaaggtcgtgccactgcactccagcctgggcaacagagtgagactccttgtcaaaaaaagaaacagaaataaataaacttctgtggtgtataagtcatgcagtttagagtactttgttatagcagccccaaaagactaagacaaggacttcatgcagaaaagtagagaaaggtgaaagataggacaggaaggctgagaggaaagaagatggggaaagaatacagcccccatcagagctccagtgaccacccatgaaatggctgcatctggagcttgaggtgccctccccgcatcctgatggaatagggcatgtcccaggccataagctgcagcccacgacagaccaggcctgtggatgtgagtcggctcagtgttgtgcgaaacttttaaattcgatgttaatttttaaaatctggaaatttcagctgaaaatctaaattttgagttcctcttgagttcctgcttggcagcaatgagctggagttaagcatggagtggccatcccagaggctgaccataccccctcagtgagccatagttcccatcctccattcattgaaggatcagcaaactacagtcggtgagccaaacttcacctacagaccttgaactaagcatagttttttcatctttaaaaaaaaaaaaaaagaataacatgggcccataaagcccaaaatttgtactatctgagtctttacagaaatgtttatggatctctgatgaagtctggccaccatgggaatttgagttttagatttctgctgtatctactgcaaagcttagtgaggaagggattgctgccactggcatagtgtccctacctaatgttgggaaatctcattgctccaaccccaaactactcagtttatttgcatgtgttgcatgtgaaagtgcataaagcgttatcataccactttaatacactcgacctcagagaatagccatgaagccaagaccacaccattcagcgcagtcttcatggcttccccaaccacccctagcaccagcagcccccacaacaaaggagcagtcaagagaataagtgacacagtcggagttaatgagatgagctgttaatggacccgaagtgtgtctctttgacacggatcagccacgtgacacatgacattcacagctaacccttgctacagaccaacttccccattagcagctgccccctgcaggtcatgagtcacttagtgccttgtgaccgagtttgggatggctgcccccttcattattttcactataaatctgtgcatagaacatgcagcttcaattagtgggtgctcattgaaacaccactgaatttgacagaccatcagagaatagaaggtgtggattatggaagggtcatgatgcagagtcactgggtttccaatgaatctggcactgagttaagtccttgcctcatctttcctcccattccggggcagcagctgtgatctggaagaagagtttcctatgtgctgagctggggtggaggggagaggatggaatgagggcagaaggaataaaagtcaggagcatgtgaagcaaacacagggctagcagtgctcattagtgcagagggcggcatcaatgtgttcttcagtaagagtcaaatgcacagcattcactcagcgagaagagccgagcacaccccatgaccaaccaggccctcagcgatctgcctctgtagatttttgtcattctcctccatcctgggtttgaagaaactttgggaattaaatctaaagaaagttatcggccttcttgctgtccctcatacacattgtgtatacccctgtctgctatcctgaaaggttctggaacagttctggaatgttctgaaatgttcttcgtctcttcccttaccactttcaaatattattctccaagaatccaatcctggccaccctattaaaattcaacccactgcccactccactgggtcccctgcctcccttaccactctccttctagcagtcgcttgtatcagcacccagtgtactgtataagttgttgatttattttgcttatggtctgctttgatcccatcccaccagggcaggtggagttgcttgttctgctcactcactgctgtatcccaggcacctagattggtgtttagcacataggatgtgctaattaaataagtaggttaaataaatcagccatttatttaataagtagttattacatgacttcagcctttccccatctgggcaccagctattctttgtcgtattttgatttttactaaatactgtcttggttccctttgtccaacacagagcatgcctctcgcccacccacccaactcctgtagaagacaaacgtgtgtttgtagaattatgcagctgctcctcactactttttaaaaatttatatatttttttctgcttttgtatcccagtctttgcctagtttaggacctggcacatagaaggcaaatctcccaatcagaaccagaggcaaaaatgtgggactggttctcactggggtgattgagcccatatcaattaatgatgaggccccaagatgctggctaaagccaagatattgagacagggaggagagtattttggagcagaatggagcaccgaggcttgagtctcagctctgggagggacacaggagctgctgggcagtgggaggttgtccagctggggagggacagaagcagagacagcgtagccaggaaggatcaggacagggaagcaaagcggagatccatgcgtttggcaatcaggaggtgcctgtcatccctgtgttttcagccaaacagaatgaattgtcctgacttttacctttgcaaacataatacaaattataaagatagtcttcgcttattactgctttacagatcgaagagttttggatttcttagaaatgcagagtttattttgtaaaatcacttgttttttgtgagatggagtcttgctctgttgcccagactggagtgcaatggcacaatctcagctcactacaacctccgcctcctgggttcaagcggttatcctgcctcagcctccccagtagctgggattatgggcatgtaccactgcacccagcaaatttgtgtatttttagtagagaccatgtttcaccatgttggcaaggctggtcttgagctcctgacctcaggtcatctgcccactttggcttccaaagtggggaagccaattctgctttttctatatattacatttgaaaccatgtaagtaaattcttaaatttccaatgtcaacacaattttcaaatttagttaaataaatggatatacctaatttttgacccttaatacattttgcattggaaactcaatcggctttggactgtaattttataggcatcattggcaatgagatgataacctatgaaaaaattacagctcaggagttatacagaaagcaataaaattcttaaagaagggaaattttttataatttaaaaaatttttaaagtaatgttttagaaacatagtagaaaatttagtgccctttgtaaaacacaagcaaacaaaaaaccttcctaatgatattggacatagccctattgtgtgtttgtacaaattaaattattttggtttgtctggactgttttcatcactttttttttttttttaggaggagggatccaaatgctttcacttcagggaacaggcagaacaataaatacattactgacaaatcatggcagcattggtaggctaagtaataaagctgttacattcttaaaaacagttaagtctgtcctggatacaagaactgtaccccctctcctcttcagtggggaccttcataaaataccagacctgggcctggcatggtggctcacacctgtaatcccagcactttgggaggctgaggcgggcggatcacttgaggccaggagttcgagaccagcctgggcaacatggcgaaaccccatctctactaaaaatgcaaaagtcagccaggcgtggtggcacacacctgtaatcccaactacttgggagattgaagcaggagaatagcttgaacctgggcggtagaggttgcagtgagtcgagatagtgccactgcattctagcctgggcgacagagtgagaccctgtctcaagaaaaataaaataaataccagaccagattggaaaagtaagttactcccaattcatgattacattatgatatgtatgctatctgatagaattggggacattcttgtaaacactatgctggcacctttggtttaattatgaatatatctcaactggaaaatcaaggttgcaactcttgtgtgccatcttcctgagaggaccacaccaaaggccatgccccagggagcccagaggattcaggatgagacagtgctcctgacattgcctccaattcctaacaaactggcttcttgtcaaattcagttaagtgtaactaaattaaagtaacccagcctcagtatagctgtcagactcaaaaatcatttttcaaggatttttatggaaaaccgtgtgcttttcaatgagcacagaattatctgtgtgtgagggaaatccattccatgagtttttattgaatttgaggtccaaagtttcctgcctaagagcttgaccccatgtgcaagaaattgggtgcagaggctcaacaataatcatcaccattagctggaagccattctctccctcggctcctgttctggactttaacttcagttctagcagagcctttgcatttttggaactaatagatctgagaggctgtagcactccagactgccagctgtccctggacctgctgaggagagggatgcatgctcagcatttcagcatctacaaattgctttacccattcaaagcaaggactcactctgggcttagttcctggtgccatgtagagtctgctgggtgaccagagacatgcaaagacagacacgcaaacatatatgcacactacagggacaggtccccaggcctaggcaggtgtcagctgcagcgggaggctcacaggcatgggcggcaaaccctgatggagggagaagaaagccccagggaaaaggctcggctctacccaggggtcccgtgtgttttggacatggctgggacacagggtgcatagggagtgcgcggaacgaaagcgtggagaggacggcgaggtgccttctgggagcagaaaattactagggtgggtgaacagtgtgaattgtgctctggggccatgtcccttttaaaagagtacaatagagaccagaattaatgtttaggaactaaatagaaactgtcaccaggcatagaagtggggtgggagtggggtatcagagtgagagatagggatccccataaggacgatggtggagaaagcataggacaggggccatttggatcagatgtcagggacagcatcagcaagtgtgtgaaggaggggtgcagggaacaaacagcccagagacctaacccccacctcctctctctccagctcttgtcttttaacacctttgttttaattataagtacatcttaactggaaaatcgaggccgcaatgtccccatttcctttcaaactcatatttctaaaccataacaaaccacatatgctggagaatcggcttcgtttcttggcattcttatagtatcattctctcccagtcccgccagccctgacctgcggaatcagcttcctgcttggtcctcagtgcgaggacggagctgtggagtcccattatcctcttggagtagcaatccctgcatcttagagcactgactcctggggaggggcaccttgatagagcgccttagtgccctaagacacagggtgcacccttttctatagaccatagccattttccaagactttgttttgttccaaagcccataactctctccttcatgttcccattctgatttcctgcttggcttattgtcatattgttgagaaaagcaacaatcaggtttcaacccgcttctttcaaccagtaagtttacctgtgtctgccctcacctggcttccctcaaccagtaagcctacctaaggcctcccgtcgctctgccctcctcccatcccagaggtatttgttcctttgccccactcactccatagcctgtatcttctgccctcttcagtttctgccaggacattcattattccttcaagtttaccttttgttgttgttgttaaatttctcccatttgcttccccctatttacaaacacttaatgataattatattatgattatgatttcttatatttactgagcacattgttttcataacaaccctatgatacaaattccattggcccattatatatagagagaaatggagtcacagacaagctaagtaacccgcagaaaaagcacacagccaacaagtgatagaaccagaatgtgaacttggacagaaaaaactcaaatggcccatcaacttagcaactacatcatgctactactcagaacttcctcttcctttataaaaaaggaagggagctttcccttagtcatgcgcttccccaaatctaccctttatctataagatagctttacttttcccattacttccaaactccccaaaatgagttcatatccactacttcagctttcttatctcccgtgtgccatacaaccttttgcaaatgtccacagaactggctttctgtagttctgcagtgatctaaaaattgtcaatccaaaaacattttttaatctaaaggattctttccctctgatctctgtgtcgtcatttgcttctgcttctcagaagacacctgttttcctgctgccttgcattgcaaccttctttcagtgtgtgtatctcatagctctgattacattctgaactcttggttggcaaaatgttttacatctcttagttctacaccatgtacctagtaggtagcacatttccaacacatgcctatcagctctaactgggatgtaattggaattgtctctcattggctccctgtaattgagattgtctctcattggccccctgtaattgggattgtctctcattggcccactgacttattgcacactcagcagaaataggttgctttaaattgcacacttttgtttcctctttaacattgcttcagcactctgtggctagagcccctggttcacaagggtttttttgttgttttttgtttgtttatgttttgagatggagtctcactctgtcgcccaggctggagtgcagtggcgcaatctcggcttactgcaacgtctgcctcctggattcaagcaattctacctcagcctcccgagtagctgggactacaggtgcatgccaccacacccagctaattttttgtattttagtagagatggggtttcatcgtgttagccaggatggtctcaatctcctgatctcgtgattgcccgcgtcggcctcccagagtgctgggattacaggcgtgagccaccgtgcccggccacaagggtttttaattgaagaacaaaagccatgaaagacacccaaaggcagaagaatcttgattatttttgcccgaagtcattctaatcaattgagaaaccccaataccacatcactaagcaaagcttccagcggggagagaaggaccttcaatacacaccatagacagcatttcataagggaaattttgttttgcaactttctgttgtaccccttgttcaaaattgggattgattcacgaggttgtcaaagacatggtgagaaggaataccatgataggtccccaagattcatgtttccaaagagcaaataaacaaaggcctagagttggacacagtaattctacaaaattgacatttcccatgaccgctaaaaacttctttctctgtgccaaacatagggatgggttgtcctcggggaccacctttggctgtgtaggcttcgatctgctccggaaagcgtctctaacctgcctgtgggtttttggtccttacagctcctgatggtccacctcaggaagttcacctggagcctatatcatctcagagcatcagggtcacatggaaggtaaactcagcaaacatttgtattctcggtgctttccccccagggcgagcccttcactcctgttcagtgttatgacaccaagactctcgaattttacaaaacttttattttttcaaaattaagttgaaagcccttttcttaaaatgcagtatttgtatccacattttgaatacttttacagcaaattctgtgtctcagagaataaagtggttgtatcttttttttttttcttccttgaatcttgatcaaggtctaagcagtggtctctacagaaatagtaaaattgatgtccctgactgcatgctctcatttcatcccagcaaaaatgttttcaaattgctttttttaaatggcaaagcatgcggtggcagacagtccaccgaggtggcagaaaacaggccaagtcctcactgtgccactaactagatgtgttctcaagaaagcccctaaattttcttgccagtgaagtgagctgttgaatccactgactcccagggcagtgctaccccatgtgtggcccatagaggcagactggctgctggttactttagtgtttgttggaagtagctgggagagaaagaaagcttgagccacagtgtaaacaattgcatcactaagcacatcgtttcattcaacagccatggtttccatagcaaattttctcaagtaaggaagcagtgttgattctggagcaagctcatcaccaaccaccactgttccatggccttcaggtcagtagcatggccctgacctggtgggccatggcattagtcatcctcctgaatgtgctcttggagatggctctgtcttaggccaaattccgtttcatccagaacgttattatcgaatcaaaagttctgtaacattgcattaactatccccgctctgaatttctctcatggcatgtgattttttttcttgtctctttcctcaccgttttttttctgtggcgtcactgggagaagagggcagccaacaactacaataaggtcttcacatcacacacctcttctaaccattgcatctgtttgtttgtttgattgtttgtttgttttccttctagtatgggttctttcataagatgaccagcctctgtaacaaaaatggattttcattgttggggcggataccacctttggtattacgggcgttaatgcagcgagcccctttgtgtcagcgtttctcaaccgcagccaatgagttgtgtttccagcgggcagcgtgatatgactgtttagctgcatagaaagtgcaggccgaggagtgtgggaggtggtgtcattggtctttgtaagcacatccaccccctgcgagcatcacacacattgtagaataaagacgctcagcaagccataaccccacacgcattcccgccactctacaaatggaatgctgactcactctgtcttgaattgaagactgtgaagttttacccactagctttacacattctctcgtgttttgccctgaaaaagaccaggtattactgtggcctcaaaagctttttggatcttttgggtcctgcatgagagaggtgtctgtccacagaggatctagctcttataactaaaaatggaaacttctgaggctttaaaaggcattgtatcctttctctctctgtagaaagcagccacaaaagtcagtgcattgcagttaaatttctctttagtgccaaagggtgaaatgttgtgggactattaaaaggaagcctggctctcattagattgtgaatcgactgaatacattgttcatggaggagtgcaatctatctctgtagtgggcctttgtggcatggcctgtcagcaggcagacttgccggtgatctaactgactaatgaggttggggctgccctgtcaccagcttagcatttcacatcggcctgtttatataatgagcttttaaaggacaccactgattcaatcgaattggacactattacacgaaatcttaagtatatgtaaaggacaatatgttacatataacatgcctttatttatggcataaaattcagaatatctgttttgtgtaaggagaaagaaagaaggagaaatagcgttagccccaaagagggagccccacatctgtcagccacggtggacatatgcagtcgtgggaagtctaaggtggaagctcattcatggtcacggacactgatcagaagtaaaagatgcattcagtacagagacacagggtaaaggaggaaatagctctggggttttggtgggaaaatagccatttagactctaagcctttgaaaggtaaggggcactttggtggcctttctgtaacactggagatagatattacatttatttaattatcattgaataagcactgcttctgtaatgacaccctctattgatcaaaataagcaactttccacttttatttcattttattttatttatttattttgagacagagtctcactctgtcgcccaggctggagtgcaatgacacgatctttgctcagtgcaacctgtgtctcccgagttcaagcaattctcctgcctcagcctcccaagtagctgggattacaggcatgtgccaccacacccagctactttttttgtatttttaatagagacaggggttttcaccatgttggccaggctggtcttgaactcctgacttcacgtgatccacccaccttggcctcccaaactgctgggattacaggcgtgagctaccacacctggcaccctttttatcttagttatttctttcaccaaagaagagcttctaattttaaaatctttcatgtccagcaaaggttgctcaggacctagtgaatgcagccatcctacatcagctgcagcacctggattcaggccccttatcttgcctcgccttcccagggatacctacccaagcagcagtccacaagtgtcatcgtctctcctgtcagtgttcaggcagtttgtaacatgcttacctctcctgtccattcctgctcatttgaggctcagattgtgcatgactgcccccatgaagatgggaatccccagagtgcaattagagtttcaccctctatgttacccattgctcttggcgatggctcagggaggttcccacccagtggcttctgcagtctgtttcatgtgcatcccctccactgttctgggagctccttggcagcaggaagagaggcttactcagttctgatccctcatggctggcatgtgttccatgaatgaatgaatgggtaagtgaaggagaggtgagtgtatatgtgagctgggaatgaagaggcctagaagacaagtgttccatatcacaattgcctgtgaagcattacgtgtttccaagactgccatggagatggcatccccgctatcaggatctccagagagcaaacatgctgagctcaggtctaactcatgatacagtgaaatgccctagactatacaacggcaggcacccaaagatgtgaaccacactcagtacaccaggcgaccaaccacttttcatatgagtttctactatggtaattttcaatatagtttattgaaaagtaaagggcagtagtggtccaatttgtgataagtttcatgggaaatggacatcttcacatcccaaatataagcccatagaaagatattcaagaggaatatctttctataggctatattatgatgtctatattatgcaagatgaagtctcagaaagggctcttaaatacttttacaaatattaagctaattaaagtgctaccccatgccttgacagaaatccaaaagacaatgtaagcagttctgaataaaattaaaagtaaatgacaataaagtttcatttgacattcttggagaaacaaaaggatttgtgtaagcaaatacaatttaattcatggcaggttttgtttctgattcaaaatcagaaagaatatttaaagctatggataattgataacatatttgatgaagtacctgaacattgtacaactaaggaattctttggtttttcagaaaattccaatttttagtttatctcctaaagtgtctcttttagcagtgcctgtcaccttctctcctaatcagtctcagaatcagctgaccctctttggatgcaaattaaggacaatgtgattaccagctacttgtgtgcatgcttgtgtgtgtgtgtgtgtgtgtgtgtgtgtgtgtgtgtttgccatggtcactcataaaataaaacattcattatttagaatatttaatgattatatacatctcaaaacatttatccagagaatgcaatttaagacagagtttttttcctattgatataaaatttgtgttgttgttttatttttgcattaaataagaaatctttgcagaaccacaggctgtccccaaaatatgaaatggtcaattgcttaaatatttctgtgctgagaacaattatcaaagtgattacttgcaataaaaatcctgagaataattttaccatttggccctcagtattgtactatctgcgtgaaaattttactgagaataagcaaaattctcatttagaattaagaaagagaggtatgatttctgtaaaatactaagttgaatattcagagatttaattaaatttcagtaatctgaagaatatttttaaccagaatatcacatctccactatacccaataattccagctaattgaggcatcattacaacctattaagtttcagagttgagctcttacaacaggaaaatgactcagtctgtcatttaaaaacaaaactgccttatttccagtgacctccgtagtcatcgtttaataaactgcaggctccacttgccttctgcactaaaatccctctaccccagggaagtgcaaggtaccttggaaaaggcagtcttggaggcaccttccagcactagtatttcctggccaactgggacagctgtccttagagatatttgctccccgccaggcacaatgctaaacttctgcatgcattatctcatttgatctgtgagctgggaacacccagttttgtgcagagggagatcctgaagtcaaaggaacttacccaagttctgaaggctggtgactgtcagattgaggacttccacccaggctgcctggttctgcctcctgggtttctgagcagtcaaccagttaattactaggaagtgccaagattgtagttcgtgcataataatgctcaataaatattaactccctttactattccttgcaaactcatgttataaattatacccaaccccataaaaattaaagatatatgaaatttacattcttacgtagtatccttttctttccaaattgtaaacttaagcttagagtaactttcatagtgagtagacacccttttttcctatatcaactgaaattcaaaaaggttgccttgaaataaactttacttaattcttcaactatcactttaatctttaggctatgaaaaatgacaaaagtttgcatttgcttttaggaactaatccattggttctagcattggttttataatagccttattgaaattcctgaacaccaacatgtcttacaaatacttaaagaatttttagcccttctcatattaacgagtctaacctccttccttgataacaagaaaagaaaaaaaaatttcaaaatctctggtcatccgtataaagtaagattgttctttctcaacttttttaggtggactagactctaggttccgtgagggttgaggacatgtcttgtgtgttcactgtaccctcagcaggagtgcaattaatatgcgttaaattaatgcataaaccatttaccattgtttacttttatcataaaaggttcatatcaagaggtggtgcttttaaaaaaaaaactgtggactttctagaaagccctaggtgactaaatttgcatctttttggtgtatatgtaaactatgcatgtttctttaatgaagccatggtgtttatttataccatttggaatgtattctgcatctctccgtctatacattgggttactcctctcggtttagccatgtgatgggccttcttcaaggactccagttctctgtcccaggacagagctgccagcctgcatgcacaaagggtccggcaggtctcctcaactaagcaggcagttcccttggtttccagcctagagcgcagccaggaaaatgctggctgcatttgcaagagctactcgcagccacaggggtggaatctaggtctgatgctcaggcaggctgggaagagacactatctgggactgtcagcctaagaggcaattcttgattcaaaccccactgaaaaagctgtacctctccagcagagtggccttgacaggacacaaattgaacttggactaaggcttaggaccaaggccgtctgccgtcgagccagaaatcctgttggatggtttcttctaagagtttcacgttgagtctggatgaacacaaaaaatctaagtgtaggcactttgattttttgtataacggttaggttataagctgtaaagttgcaatataactttagaaggcaagtattgtatttgcctgatttaaagagcatattatcagaaatgcaaataaggttgcaactaaaggggtattttggacatctattgacgctcatccttaggtgttttcttagtgcatcaacattacatttttacaattggaccaggtcctgaagttgtgacactaggtcaaaaattgtgtatggtcagaatgatattgaaaatgacttaaattgtctaataagcacactatgcataatattcactaggaagctttacagtaacatatatatacaaacatgtaatattcatagtgaaaactgaaaagtacatgtaaaaatataagttgacactatttcatcacattttaaagtaacattagcgtaagttaaatccatttccaacaagtaaattatatataattagaatacagtgtaaaaagtactggattaaatttcagaaaattagatacgacacccatctctacacctaacaaaatgaccttaagtcacttgatttgtcattattggaacttgaacccttttctctagttctgagttgtgtgttttattcattatgtcataaccaagaaagtagcagtgcattttaatgatgaattctcctctctcctcacctcccagtgctgacttgatagccatagaggataacggatgtgggcccactctggaatccataaggtggtcccttgattaacaaccccgatttggatccctatcctagatgctgattccgcccaccccaccaatggctctggacagcactgccatttctgatggcaaatatctcccaataaatgtaaatgtggtgaaattttcccaacaaaaaatagaagtttattttcagtaacctaataatagatggatagggtcgggcacagtggcacatgcctgtaatcccagcattttgggaagccaaggcgggcagatcacttaacatcacgagttcgagaccagcctggccaacatggtgaaaccctatctctattaaaaatacaaaaattagccaggcatgatggatcatgcctatagtcgcagctactcatgaggttgaggcagaataattccttgaacgctaggagacagaggctgcagtgagccaagattgctcaactgtactctagcctgagtggcagagcaagactcgtctcaaaaatttaattaattaatttttaaaaatagatgggtaggtagtaatttaataaaagtattcagaagaccatcttagacagttttatcagttctcatataatcctaactctgcttttcacagagaacaaattggaaaatcaagctaaagttaatatggcattgagcattatgaatgcatggatgccatccgtacagggagtgcataggtggatatacactgtttaatgtgctgtatttcctcagacagcagtccttaagccatctcgctgatgacatttcccatcttttcagagaaatcaagtgagatacataagttagtaaacagggcacagatgttagaatgaaaaaggaaaacatatatccaatcaagaattacatagacatcatcaaatggcatctgctatgtcatggacccctctcctaaggcaagggaagaaacatgacattagttttattgttattattatggcaactcggctggacgaagttggttagggtccatcacaggaagaaccccagccaggagggcacagctattttccagactattttcaaggtagcatgaagcaagacagaaaaacacaatgtgtgccttcaaacgtatttcactagttcaaatacatttaagttaatgcactaagatgtaacaaactatttcaagatagcccataacatttttaaagccaaactcttcattgtattaaaaatgctgaaagctacttcaaattctttcaattcctgtaataaactcttcctgttcttttgaaaaatttaagttgagaccaaaaataaaagtactttgtgctttgagtaattatagatgtataagaaataaaaccattttaccttcttgttttgcctgccagtaacaatttgaagttggaaacagggtttgtttttctgtaaataacagaagaatttaggtggcagatccttagtgaatttaggaaacaagacttcccactgaaggagagtgtgattcagggagtgcctgtgttgctcccgtgggcccgtgtggaatctgtggcacgtgttgcatctggacttgtggagtatttcccctcaacataagccagagtgttcacaggggcccttggtctgaatgcttctagcacattcctaacagggaacatacagtagcctattggacaactgtttcttttctttttttcttttcttttgtttttttgtttttgtttttgttttgagacagggtctcactctaccacccaggctgaatgcagtgtagtggcaccatcctggctcactgcagccttgaccttccaggctcatgtgatcctcctacctcagcctcctgagtagctgggactacaagtgcataccaccatcaccatgcccagttaactttttgatttttgtagagacaaggtctcactatgttgcccaggctggtctcaaattcctgacctgcagcggtcctcctgcctcggcctcctaatgtgctgtgattacaggcatgagccactgtgccttgcccagacaactttttcaatattctcctcgcaaatacctattcatgcatgttgatgtctaaaattctctttagtcaaggctaaagcttttcattacccaaaaatagataagaggctaggcatggtggctcacacctataatcctagcactttcaaaggctgaattgggaggattgcttgagcccacgggtttaagaccagcctgggcaacatagtgagacctcatctctatcaaaagaaaaaaaatagctgggtgtggtggtgtgtgcctgtggtcccagctgctcaggaggctgaagtgggagaatcacttgagcctgggaggtcgaggctgcagtcagctgagatggcatcaatgcactccagcctgggtgacaaggcgagactgtctcaggaaaaaaaaaaaaaagaaaaaagaaaaggaaagagagacaaagcctagctctagagaaagaatgccatcctcctcttaatccctactgagctatagagggcagatattgaatccaggactggagctccattgttactgcagacattactattccttgtcttctgatagaacacaagttagaactatccattggagcatggataaaaggagagtaacgaactctaaccaacactgggcagagcccaggcctttctccaatgctcctttcttagtagtgcctctcctgtcaacctttctcccctctctccttcccaccctgccttggacctgcagcacacccagtaagttctacctcacatgctggttctgtccacagcactgtcctgtacgagtctgcaaactgtttctctaatgggccagagagcagatattttcagctttgtaggccctgcagtctcggtcttaactgctcaattctgctgcataggcacagctgcagtccatgcgtggatgagtgaagacagctgggatccagtaaaacttcacctaggaaaggtgaaatttgaagttcacataattttcacatgacaaaatattcttcctcttttgatttttttcaatcatttaaaaatgtaagccacaacaagaaaccgttgttagctaagagccacataaaaacaagcagccaaacagatctggaggagggaccagtttgtcaacccttatttcctggattgagatgatctctcgagagggagccacatccaactgagagagtctcatctgagacaaggctagcccctcccgccatatatgatatatgctaaatcatcactctccagttcaaagatccacagatctttggggcaggggcacaatccctccaacctctttgctaatgcataacagaagtgacctttgctccagttcccaataagttcctcatctcgtcttagaactcctcagcctggacttctttgcctatatcactaccaccattgtgatcataacaatttaacaagtctctgggaagttccagactttccctcatcttcctgtcttcttctgagccctcaacactcttccaacctcagctcattacccagttccaaagttgcttccatattttcaggtagctttatagcagtgccccactcaaaaatggcttctggttcattggttcttttggcacagatgtaaagcactcaggaattccttccagttataaaattaaagctcacctttcagtgggcaggctccttctgagacctggatcttctctggttcttctgaacagatacttagcaaaaatgacaaaggctgcaacaacccggcgtgtgactgatgccgcttactcctttacaagcccctttctctctctctctctctctctctctctctctctctctctctctctctctctctgtcttagtttgactgtcacagcttccacctgcctcctggcagtgccgttcccatctgtgtgtcccttccagcccagggtcactctcacccgctactggctctcagcctcatccctgtggattccaggactcagtttgtctccatacttaccctctcctcctacatcacttaagggttctcttagttattctttaatttatattattaaatataatataaattatattatatatagggtgggagggaaatggaggcagttccagtttaaggacctacagggtagacagaggctgccctgtgtgcatgtcagagcactggctggggcgactcctggcttggctccctgccttggcctccagcttcccacgccctgccctccccagtggaaagggcctgtttcgttccaaggaagattcttcttcaccctcctttcctgccttttctcatcaagacatccaggatgcctccagagcatgcagacccagtggtttgttggggtgagaggtggatgtggatgtgccttcatctcactcagctccacccctgcccgactgacctctttaccagcggtgttggatcatgattggccctcccctggcgctgtcttacagagcttccagaatcagacactgtcttctcccatcccgcaaaactacttccgagcatttttcatggccccatgaccatgcctttgaaatcctgcctcttgtgcttgtttatcagattggagtcggggtgcccctccctcccttatctctgtggcctttctcgggcccctgccctgccctccttggccacactgccgttacagggcctccattacctgcagaggggctactctgggttgggccctccaggcgtgtgtggtgggccaaagccctttgggttcactcagccaccgctaaatagttggggcccagcctcaggctcacagactagcataccccctcttttgcatcagagtgcaccctctaggtccccattgttgggcgcgggagctaggtgggggtattcccagaggccagccctcagagttgattcataggaagcaaagcccgaatgcccttgtgtggtccttggcagagagcactgataggcctctgtggctggtaggaaatgttaactgtggttagcaggtggtgtgatgtatgaggaacaacagaattcaaaaagggagtgtcccaaaaagaggagctatgtcacaggtgtttgttggctggatgaataaagcggaagctgtcctacactttagaaatggaataaatggagttttgctttgcagtagttaacctcaattccatgtcataaaattatcaatctatttctagcattctgcatttgtgtctcaaggcaaagcccacatataccttggccactctttcctcctcagctgccaagtctgactagaatatggcagctgcagcctgcaagtaacattcttggctctcaagacagtgcctatttcaaataatctgtcatttatcatttatttctcaaactgaaattgcacagcccctttgttctaagcactgtctcattatcaggtcatgtggcccttttctatttcatgaaatgtggacatctcatcctttcctagctcctcaaaagataatgactttgggggagccagtcacgtggccatacatctacccattatgagacctaggacacagatactgtatttaatacagtgcaactctaaggagagatatatgaacaaaaatatcatttgagaccggaagcagtggttcactgctggtaatcccagcactttgggaggctgagttgggcagattatttaagctcaggagttggagaccagcctgggcaacatggcaaaaacccatctctacaaaaaaagttcaaaaatttgccgggtatggtgacatgtctgtgatcccaggtactcaggaggctgaagtggaaggattatttgagcctggggtggttgaggctgcagtgagccatgatcccaccactgcactccagcatgggtgacagagtgagaccctgtgaaaaagaaagaaaaataaaagaaaaagagggaaggaaggaaaggaagggaggaaggaaggaaaggaagggaggaaggaaggaaggaaggaagaagaaaggagaggaaagaaaggagagaggagaggaaaggaattatttgaggcaataatgtaagaggtctcctcgacctgacatagccccctcaaaatccattgtccatggaccaagatagccagctggttctcacaccacccctatacctattgtaaagcagaatccctttagtgctgagtaaggtagatctttaaattactcccaagaccaggaaggtctaacagttttatgtgcatttattcccttttgtttggccaagaaccaggaaaatgggctactggctaacctgagaaatgggggaatgcatagttgctgctttttaactaaatagtctctcccagcaaagccaaatctaaatcactgagtgactcccagtgataacaacagtgattctcagactcagggagcactggtatcccctggagggctttttaaaacacacctcaccaggctccacccccagagtttattcctgattcaggaactctgagtgggtccccagttcttgcagctctaacagttttccaggtgatgtggatgttgctggtagcgcaccataccactacatacaggctccataggttctgtcccgtagatatgtccctagcttcatctgtgcttgtaccgtcccccacccctgtgatcaccatggatacctcaccccagagtcacttgagcctctctccattcctgggtgtcttctgtccttgcacctgggtgcagctgtgtatgccaattgctttggcgacagcattgtaccctccaaggcaatgtccagtcaccctttagctcaggtgaagtatgctcttctctggcaatccttctgaccacgatttgcccctccatagtactctgggcaaaccttcagcactgcaagtatcaggcagtattctgagcactgattcactcaaaggtgtccctggttgtgccatgccttgtgtagaacagatgcccagttaaggtttgttcaatgtgatgcacccattcactgagcaagcttatggaatggctactgtttatgttggaaagcaggtaaggggaggctgcagaaaacgcacaaagatgaaaaagactgtccacccaacttgtcacataagggaaatgaggatagattacattttaagtggatttggaggaatctataaagaaaatgttcaattcatttcccaactaaattattcagcatgcctgagaaaggcagcattcttcaaacgtgaaattctgcagtgaggctcttagcagactccagccaacaggtgaattctgcacatccagcagaggccatttcctttcaatgggaagggggcaggaggcatgagggaaacagaacatggctggtggtcttcagcacaagagatgcctgttctaatcattcacatccaggcaggtgcagtgagcatttgcacgtctactgttttactgtccctttaaaggatgatgcatctgccacaggcggcttgcagccgactgattgagaaggacatataaaataagtcacttgcacaccgtgcaaatacattgacatggtgcgactgttgtcatggagatcaaaagagaaggtttcttaaaggaagtggaggttgggagggatttggaagctggagaaagggcatctgggaggatgaaaggaggctgttgaggaggactacaggagaaaaaaacctgccaggctaggaagggggagagagcattccacagatggcagataaatgaaagaaatgagaagaaatcaggatcattactgaatccaaaggcaaatgaatgggggagtaaagttcaacatgggaaaaacaatctttgtgtgagaaacctaacaaggagcaggcatgaccttctcttagatttgcactgcgttcaaggggatttgagaagaggcaaacagaaagcactcacttaggaaagaagtcggttgtttgtaaatacgtcctcaaggatttctttaacttaaacacatttctaaatttcaacattttccctgtggaaagggccttgttttattgagttcttaaataggagtagaagggagcccttagttttttgttttttttgtgtttttttttttccatatgcttacgtttcaaaggactcctttaatttgtcttaagatgactggttaccaggtgagatttgctgtaaatctgcaggtccatcatcataaaaacatgtaacccaccggctggctgagtaagtgagcaaattctctttctggaatccttcttttaagaaggaaaaaaatgaatgacagtgtccaaataaattggctcatcagaagctattttcatccctggtggggcctgggcaatgaagctcaacccctccaaatcctgcctcaacctgtcatccttctgtgtaggccagcaggctaagtcccagtgcggaagccaactctcagcttgaatccacacttcccggctgtcacactagactgctgagttctccacttctgtagtggctaagccaggcctctcttcaacagctaaaccatgtgtctgcagtcaaggaatttcttctgacttcatacccttgctatcagtcctttacccagttagattataaacctgtacctgtgatcattcttacccacctcttttttttgcatctcatgtgtgttcaaaaccattctcttctccatctgcaagaatatcttctgagaacatccacagtgttgaagccccgatttagacagggggaaataacaagtgagatttcattctgtagggttctttgcattctagagcttgcaatgacattctttgaaaccacgtttcattgagaatggtggccactagaggaggtagaagtgatcagtgaatgccagtggagaccagggagggagaaggcttcttggtgggagtggtctagggaagagccctggtgagctggaagctgagctggcctgcagagaaggagtagtgggggtattctttgaaagaagaaggaagaacattttttgacaacagcttttataaggtgggaatatgtaagacagttgggatccccaccctttttcaggcagtcagagaggaacgcaggtgagcaagcaacacccaggaggcattagtcttgagagatgaggcagcgatcagatctcacaacaggtactactgagatcgggagacagagatcaaagaggcatggtcaaagtggtttcctaggaaatttgtcttctccaatattatgcaactcagattcaaaatatgtttccagatccctacctgatttcttgttttccttttcttcttaccccaccattaacctcattcactgagtttcatgaaagtgaaccattatttccacccatgtatcaattgttctacagtgctaattaacaaccttaatacagtgttctaaagatcatttccctataaggatatattctctataccccagaaaaccatctccctttgttcctagtagacacatgctccaagcaaagatgtctaaagcatcattcaaaacaattttccagttaaggatcttatgcactaatttgccttgggaatatgaagcccactgccagacaaatggattcacgtgtctccactaagcacaccttccactcctactgactcatccataactcagagtgagcctctagtgtcattttcgaaaacctgaaccacaggccataacatttcttacacttaatatacaaaatccctacatttatggatttttttcagaggttgttttaaaatacatccacaaggatttctttaatttaaatgcatttctaaatttcaatctgactagtctatctacaaattaataaagtaacttaaactttccctgataaagaatttttgcttgcttttatgcataaaaatatacaattttctcttcatgtgatctattaaattttcctctgattagaaatgccatgtatactattactttacaaaactaacaaactttgcaaaagggtgaaaagttctctgaggctctatgagcggttaataccaaatacaactttggagaattcctaccctgtacttgccttgagatagttgttttaacatatttgaccttttgtttcttcatgtgtaaagaagcatacttatactgtgtggggttttttagggaaagaaaatgaaataatatacataaagcaccaattacaatgggaaaaaacagtgttcaataagtggaagtggaggtggtagaggtagtagtagttgtggtcattgtggtggcattcatgttggtgtgggatagtaatggaatgatggatggttgtggtgatagtgatattggtgttgggatagtgatggaataatggatggttgtcgttatagtgatgttggcactgggattgtgatggagtgatggatgttgtggtgacagtggtgttggtgttgggattgtgatggagtgatggatggtggtggtgacagtggtgttggtgttgggatagtgatggagcgatggatgttgtgacagtggtgttggtgttgggatagtgaagaagtaatggatggtggtggtgatagtgatggtggtgttgggatagtgatggagcgatggatggtggtggtgatagtgacggtggtgttgggatagtgatggagcgatggatggtggtggtgacagtggtgttggtgttgggatagtgatggagtgatggatgttgtggtgacagtggtgttggtgttgggatagtgatggagtgatggatgttgtggtgacagtgctgttggtgttgggatagtgatggagtattggatgttgtggtgacagtggtattggtgttgggatagtgatggagtgatggatgttgtggtgacagtggtgttggtgttgggatagtgaagaagtaatggatggtggtggtgatagtgatggtggtattgggatagtgatgaagtgacggatggtggtggtgatagtgatattggtgttgggatagtgatggagtgatggatggttgtggtgatagtgatattggtgttgggatagtgatggaatgatggatggttgtggtgatggcaatgttggtgttggaatagtgatggagtgatggatatttgcggtggtagtgatgttaatattggaatagtaatggagtgatggatggttgtggtgatagttgtgttggtgttgggatagtgattgagtgatggatggtggtggtgatagtgttgttggttttgggatagtgataaagtgaagcatctttttagtgacagtgatggtggtaacatcaaggatgatgatggaagtagtggaggttaaagtgtggtttgttggtgaagtttgtgataaatatggtggtaaagttggaagaagtgatagaggtgcttctaccattaggttaattttatggcagtgatgttgatactggtggttgtaatgttggtgatgtcagtggtagagatgctattgctggtggtggtggtgttcacagtatttttgacagagatgaagctggtggtgatgatggtggtaaagatggtagtagtgatggtggtggcttggctgtgtgggggacctgagggagtggcattgatgttggcagtggtgacagtgacctgcagaggtggtaagcattgattggtggtggtggtcatcatggtggaggtgccagttagtgttgtaattgaaatagaaagataacctagagatgagttagcacactacctttgtaaaaaacagctttattgagatacagttagcatgccatagcattccctattttaagtgtatgattcagtggtatttcatatgtttacagagatgtgcagccgtagccataattgtaaacatttgcatcaccccacagagaaagcttgcaaccactggctgctgctcccatcctctcccactaccttttaagtctgtttttaaaccttatagtttggggacctgcaagctatgaaactgaaagtatatgttccctttataagaaacacatctcacttcttcctcaggtgcaacaatttattctgcatgaaaactatagatcatattagcaccctgaaaaaaaaagatgtaaaaacactactaccatcaaataacgcataactctactccatatatttcatttcaaaattggaatattaagaaaaatagaggagagctctcttgtttgttccttgtgatataatcccttaacttaccctatgatattgcacatctggaagaataataatcaaaaaagccctatctcattaacagccaattgaaacatggacttaaaaaataagatggtcatctacttctgggacttgagttcaataaataaacttagaaacagagaaactatattgtgaaggtgtctaacatagcatttgtggtagtaaataaacctggaaacaataatatccccaacaattaaaaaaaggttaaataaaataaaacatcaatatgatggaatatgatatttaaagactatgaagtaaagatgggaatataatcataatagcatattaaatgaagaagaaaaactcagacactaaattgtacaggctacaaacacagctatgtggggcaaaacactttactttagataaatagactgaaatgcatcaaaatgtgaatagaattgcattggatagaaatggtggttgtttacttttattataaaacaaaatgagataattattccacacaatattttgcagaagtatcaactaagaaaaaataagctttattttagaaccacaggactgaaatgtagttcttctaagaaaaatgtaaagaattttctttttctttttaacaaaatattgaaatggaacagaacaaaaacacctgcgttgtctattatagttaagctagttaggatgggttttcacccatggagaggaaacaagggaagatttctcctttctacctgtacaaacagatcacaggcaggattaatccccccaaactggaggaactacatgtcagcaagcaggtcccttcattcttgtggaggatttagctaaattggtggctctatgaaaacactttctcacaggcatttgactttactgtctactcttcttgacctgactccacagcccccatactgtgaatccaacttgctgtcttagggaggcttaaagcctcaccgggagccagttgaacaattagaatatttaatggatgtaaatctcatttaaaaaataatattattttatttgggtcactatatctaacattaaaacactaggtaaaataggggaaatctctttgttggtaaatttgacttataggtgacgtttacagggaaattcatttgattaattaattaggtcacataaatgtaattcagtggttgcagcaaaacaattttcacatagagtaattgaattttcaaaacatagaatcttgaaatctatttctaaacagtgagaaaagccatagctcatcaatgcaaaagccagcacatctgtggattcagaggagcatagacatttgtttataataaaaaaggtatgagctcttccaccagggtctaactccgagccaacagatacaaataaataaatggtttacgcgactgtttcactgacacctgctggcaccatgaatatactaaattagattggctgttgggaaaagcaagtggagtccaagaaaaccataaatggagaaacttgctgtgaaaaacaaaaatgattttactgctcttggataagtcagacttactactaatgacaggctgaggcatggaatcccctgggaagttattattaggcaatccataagtgtttgctgaatccatcaatgctgttcatcagctcgaaaccttcttctgacttctcattgtctgccctcccccggtcacatttggcaggttttcaaggtcttgctccactctgtccgttccctcctgacttaccgctgggcaggtgtgcaccctttgcaggctccactcaccccatcctccttctacttctctgagccgtgccccgccacctccccccctccgtcaagcccacctgggctctgagtcttcccaccacttcagaccacccatactcacactttctagatgcctgctggccttcactttcttaccatgcatttccacacttcatagttctctacaggttcttaagtgcttatttcctctctgcaggtcgattataaacactttcaggacggagaaagctttcagaggcttgagagatccagatccatagtttgtacttaaatgtatgtgtgtacgtgtatatgtatatacatacatatgtacatgtatacatacatacacatgtatgtgtgtatgtatacatacacgcatacacataaacacacatatctgttgactgcctgaaagtctacaaaacctttattccctagagcctcatcttggtggcattcgcatatctttttttactttttgagactgagtcttgttctgtcacccaggctggagtgcagtggggcaatctcagctcactgcaacctccgcctcccgggttcaagtgattctcccattttagcctcccaggtagctgggactacagacacccaccaccatgcctggctaatttttgtatttttagcagagacggggtttcaccatgttggccaggctgttcttgaactcctgacctcaagtgatccgcccacctcagcctcccaaagtggtgggattacaggtgtgagccaccgcgcccagccttataccatccttgaaaaggctctggtttctaaatgagtcctacgcatcagcctaaatcctactttgacctggtggaccatcttcacatcagcagggtggagttagcaccagcctctctcttgccccacatttaatcacccccaaatcattccagaatgattcggggcttcatgaaagagattaccttcctattgggtgtgcactcaccttcccatgccagttttcaacctggaaacactgtgattctgggatatttccttagaatgtaagctccatgaggacgggggtcttttcttttgtcttcttacatttccaaactcaattctattccctggtgcctggaacaaggcctggcacacagcagcgagcccgagagttcttgctgggtgcaggcctgagggtcagtctcacccggtcgtaagcgtacctggagacgccacaaacatgatctgtattttgacactttctcgccagttagacaagtcaaccagtacatcatgaaggacagaatgagagcgcaggctctggggcccaacacccatgttcagattccgctcctgccatgcatactcaggtgacctcctgtgtccattgacggtccagtggctcagaggggctgggagggccggatgcattcacaggtaaaggaagggtgcctggcacagaccaagttgcactgtacgtgggtttgcggctgctaccggaccaccgccccagcatcgtggcgatgactccactttatttctgctttcctacgtgggtgtgggcgttgatttcgctcttgtcctacctcaagacttctttagtgtgttcttttctctcctgtttaggctcccaagaaacatttgcaaaatgggattatccgtggctaccaaataggttaccgagagtacagcactgggggtaacttccaattcaacattatcagtgtcgacaccagcggggacagtgaggtttacaccctggacaacctgaataagttcactcagtacggcctggtggtgcaggcctgtaaccgggccggcacggggccttcttctcaggaaatcatcaccaccactctcgaggatggtaggttcggccggggcctggtcgtggcttttccctccgcaaaggttccctcgggtctgccccggggctcccccaacctcgcactcccccgccccacgactttgcagtgacctgcagggcctggggtctcgggtggaaaagccttccctcgtgacctcgcccaccccgctgatctgcccgccctggggcagggctggactgcaaagccagcaagtccctcccttttcagactcttcctcattcatttcaggtacaagaattgggcttttctggagtgaaaacaaggctctctctattactgcagaagtctcacgagaatgcagaaatgctatttgctaaaaaactttctcccaaatgttaagaaggttttttaaaatttattttatttttcattgtttcctattttcaagcattctgagtacagagaaaaggaattttcagattgcacagtgatcgatcgccccctagcggccgagataaattaattagcccttccaccatgtcactgagaataacccagaagctcaaatttccagtagtgcttgaaaatagagaaccctggtatccagaggcacagtgttttaggcaggaagttaagatatggggttatttgtagcaataagtggtagctttgaaggcaggaagctggcactacatttacctcttgtgcagttagtcatttgatcatagatttttttttgagacggagtccggctctctctcccaggctggagtgcagtggcgcgatcttggctcgctgcaagctccgcctcccgggttcacgccattctcctgcctcagcctcccgagtagctgggactgcaggcacccgccaccacgcctggctaattttttgtattattagtagagacgggttttcaccgtgttagccaggatggtctcgatctcctgacctcgtgatctgcccgcctcggcctccaaaagtgctgggattagaggcgtgagccaccgcgcccggcccttgatcacaggtttgcggaggcagataggacttgcacctgtaatatctgacaatttttgcgaggagaggagtcttcaatgacttgcagcctgaacactggaattgtctatcttcataattgcaatagtcgttaaatatgcctttgtttttgcttcaatgctcatttttcattaagatgcgtgtctcagccagtattttgcaccgccccagcgccaacatttaaggtttacaaaagctcagtactaaaaatattttcaatattcttctgacctgtctatggtctctcttccctctagagaaagggatgaggatgagacaggagaaatctatgattatgtttctactttttagcactttacaatggttcagcttccaatttatatgccagatattactaaatacagaggtaccgtactctataaagtaaatgcaacttaaagaagtaacttccaagagtaaggggaaaataaatcagacaaacaatgattttctactcaggcaataaaattaagaagggtacacgactcaagtcccaacaactgtcctaaaagtaaagaaactaagttggaaagagagactatggaatccattagaatatatgcattgactcatgatattttactgagcactgagttatcataagatttttccagggaagtgatctttgttattttttctttcattttggggttgagtgcaattttttgcttgcatattgaaatattaaaatacgttgctttttcggttattgctttgctcataaaccacccacagttattacagattctaattatttgatttcagtgcccagttacccccccgaaaatgtccaagccatagcaacatcaccagaaagcatatcaatatcctggtccacactttccaaggaagccttgaatggaattctccaggggttcagagtcatttactgggccaacctcatggacggaggtaagaggactaaactaggactttgggtttgcctccagagaatgcatgatggaatttgcagacccctcctagttcctaacaaggggctcaggatatggcgggcacctctttatcaatagacactttccccttttctgtcatccctcatctgacatttgaacaggtctctttgtttaaaacatcacacaccttcgaaacccaagttgaagcctaggcgggggcggcacttgggaaatttcaacatggatgtattttcctaattatgtctatgtcaaggctctgcaggcagcaccaaaacctccatctctatctagaacattctgtgtgatatgtattctaaaatgttggcctcttcctacttcccaaatagaactccgcggggaaacgttaaatttcctgtagttgtgctgtaagtgggtgtgggaagagtgcccaggcacatggaggggggcactcaggagggggccaggaagttcagggccctcccgttttgtctcctgtttctctttctcctcttccttccccttctcctcctctctcttttccttgttctttatcgtgtgtgtgtgtgtgtgtgtgtgtatttcaagtggtagggcaaaatgttcctgtttgtttagggcaaggctttgaataaacgactttctcaagtggacataagattggggccacaagtttcttgcagcaacacctcagtgtcttcgccctcaggctgcgagtggtgcccaccaggctgggccgggctgcgtgagtgtgctggggcagagcgaggctgcagcccccagcaggaaaggcctctggaagcctgctcactgtctctgtcccaagcctggggggcccacacctgcctcctcccctgccctccatttccagccccctcctgcaccccccgtcactggacagtaccttccctcttgtttggggtttcttttctttttttgagacagggtctccctctgtcacccaggctggagtgcagtggcacgatctcagctcactgcaactctccacctccccgggcccaagcaattctcctgcctcagcctcccaagtagctaggattgcaggcgtgcaccaccacacctggctaattttcagtatttttagtagagatggggtttcgccagcttggccaggctggtcttgaactcctggcctcaagtgatctgcccaccttggcctcccaaagtgctgggattacaggcgtgacccaccacgcccagcctggggcttctttcaacccctctgactgggtgtgatccctgatgagtgctcacctctaattttgggcaaatgcggtcaaggacctatcccttccctgctcaggaccacctggatctgttctaccaggcagacccctgtccccatgcaggtaaacatagggctccacaggtggcagcagcctccacggttggtgcaacagtaaaggcaagaagacacatgagcagcacaagcattactggctcagcgagcataggcctttgagccttagctctgcatgtccctaactgtgtccctaacatgtgtttctcaggactgagagcagacctcatgcctttgttgccacatgtagtacctggagcactaccagccatgggaggcaatctagaaggacccccccccgccctccttggtcctgcagtagacacatttgccaaacacccactcgacactgagctcatgggaaacaccaaggttgctgtgtctgtccctgtggaggttccagaccagtgaccgagggagatgctaatgaatacagaaccacagacccaagaagggacagccccacagaagggcagatttaagtagatgattctgtaacaccttcacccctcccacctaaacacaagttttaaaacaccccagagtaaagagcaatgaaaatttgcaaaagtcatctatttttatggacaaaataccataggatatcattacatatgtttcttctgatttctactccttatattgagtggatgaaattaaatacccttaatgttctttgaaaggcagtgttatgctaagatgtcttttctgttcttattggaaatatttcagaatccagtggtgacttcatccacatcacccatattttctaagctcactcacatttgctagcattgcctgctggtatcttcattctaaaatgaaagatgtggcttcatacctttaaagctttgaaaacttgaatattcaaaaacataattctttaaacaaagaaatgcttgggagtgtgcatgcagctttttaaagatactttcactcatgggattaaaatcaaagtgatgagataaatgtgcgatgtagaagtctgcacttcatttccgaaagataagcaagaaaccttcagaaacatgaacctgcctgcgaatggtcactcttcctgctacctgagagatttcgtttatgaggcaggtcagttcacggggctactggacacttttgcacaaactccccagactgcagcctccgggactggctggattcccacagacactgagcaggaagtgactgctgaccgacaccacatacacgtgcgcacacaccacacatacatgcaccccacatacaccacacaccacacataccacacacacacctcacaaacatcacataccacaccacacccacacatatcccacactcaccacacacaccacacctcacacaccccacatgcacacacaacacacatacacacaccccacatacaccacacataccacaccacgcataccacacacacacaccacacatacaccacatatcacaccacacacacatccctcatataccacacgccacatgacacacacccctcatacacatacacaaactgcatgtacatcacccaccacatgacacacactccatatacaccacataccacaccacacgtacacaaacaccacatacacctatgaaaggaaaatatctttttggcccccaaaatcactaaggaaaagtcaagctggaaactgctcagggccaacctgcctcccattctattcaaagtcacccctctgctcactgagatagatgcatatttgatggcctcctttggaaaggctgatcagaaactcagaagaacgcaacccttcccctctcacctacctgtgacctgtaagtcccctccccgcttcctgtcttcttgcctttgcttcaggttgtcctgccttccagaccgaaccaatatacttcttacctatattgattgatgtctcacgtctccctaaaatgtataaaaccaaactgtgccccgaccaccctgggcacgtgttgtcaggacctcctgaagctgtgttgtgggtacgtcctcaaccttcgcaaaataaactttctaaattaactgagacctgtctcaggttttcagggtccacataccacaccacacacaccccacatacaccatgtaccacaccacatgtacacaccacacatacacacaccacacaccacaccacacatcccacatactcatgcatacacacaccacacatacatacacacacacacaacacacactacacacacactacacacacaccacacatacaccacacaccataaccccaggcacatctcacatacaccacacaccacaccacacacaccccatatacaccatgtaccacaccacacatacacaccacacacaccacacttacacaccacacacaccccacatatacatgcacacacaccacacatacaccccacatacaccacacaccacaccacacgtacacacaccacacataccacacatacacataccccccatacactgcacactatgccacacatacagcccacatatactgcacaccacatacatacacaccacacacaccacacatacaccacacaccacaccacacatacaccacatatcacaccacacacaccccccacacacacgtaccccacatacaccacacactcaccacacacacctcacctacaccacataccacaccacacacaccccgtatatgtcacacaccacacatacacaaaccccacatacaccacacacactccgcatacatatgcacacacacacaccacacacacccccaatacaccacacactacaccacacatacacacacaccacaccacgcacaccccacacgcaccccccacatacaccactcaccacaccacacatcacacaacacatgtaacacaccccatgctactcacaacatatacctcatacacacagcacacacatacaccatacacacacaccacgcacacaggtacacacacaccatgcacatcgcataccacaaacaccacacacaccccccacacattcacacaggctgagaggggcaaatattgttactaccactgtaattagcaatagcccgaatactttccaaaatacgtctaagaaagaattctgttgttaatgtggtcagatgaaataaaactggttagtatatttgatagggaaggttaaataaacaatattttgatgaattttctgatttttttttcatggtcagaaagttaaatcatggttaaggcctgaaagaaacaatttatttgagattgctaggaaagttgtatcctttgaaaagttaccattttcctctgaatttttgctaacttccatctcatccatctttcttcatggaaaaaatggtacattctgaaaggaagcaacaattaggtgccaactggagtgtgtgggcagctgaggcttgcttcagaagctattcccgcacctattgttttctgccttaaaaccctctgaggatgaggcaagatataaatacacaaaactattttgtttaaaacaaaatttttaatagaaaaaatctgatttctaaatttattttatatatttttttaattttatttcactcatgacctcaactgaacaatacacttcagttaatgtgtgtgtgtgtgtgtgtgtgtgtgtgtgtgtgtgtgtgtgtgtgtgtgtattaaacagccctacagaggcatgaaagctagactgtagaaactcatgtttaaaaagaaaaagcgttaaaaagaatggcaaactaaacactcagttttgtatctggctttcttctttttcattctttgctttttatttcttccatatctgctagtcacctagtatctgtcatcaggaaaatagccttccttcacagcctatgaggcgttctagcagatagagccaactgtggctcaggtagttttagaaatcttaaaattgggattttgactgcctttgtcttcatggttcatgataaattagttaatcaaaataacttgaaccccccccccaatgttaattctaattagtatattaaccattagcatttttaatcattttgttttaagtgtttgcttttttttttttttttttttccttgagacagagtctcgctctgtcgcccaggctggagtgcagtggtgcgatctcgactcactgcaagctccacctcccaggttcacgccgttctcttgcctcagcctccccgagtacctgggactacaggtgcccaccaccacgccaggctaattttttgtatttttagtagagatggggtttcaccgtgttagccaggatggtctcgatgtcttgacctcgtgatccacccgccttggcctcccgaagtgctgggattacaggcatgagccactgcaccgggccaagtgtttgctttctttaagaagatcagagaggccaggttgtccttctccctccccaccaggctcctcttcctcattctgtctgattcaagagttgcattctgattcaagtatttgccggagggtcacagctttctcctatattgtgaaatgatcctactttttctgtgaggtggacaccctgcactcttgggaaaaaaagaccttcatcagagtctcataaccagctaccagcaccctgccctgatcagcccctcccctcagctgtatttttattgattgcgtgtgtatatatctgtagggaggtacgtgtgtgatctttgacagtgaagtttctaaatctgaaaagatcttaatgagttctatatttaaagtttgtccattagcatatgagtttttaattagtttgtttaaagacagggtctggctctatccttcaggctggagtgcagtggcacaatcacagctcactgcagcctccagttcctgggctccaccgatcctctcaccttgagctacttgggaggctgggaccacaggcatgagccatcatgtctggttacatttgggtttttatcctaatccaaaagacttatgttaaatatattcaggaaaaggaatataattgaatatggaaagacccgtccttcagagatgagaatttccaatccatctgggacaaccaagtattgatattttgactacctggtgaccacacatgctcacacagtctcctcattttcgtaagccctccgttgagatttccaaattgtgacctttaacagctggcaccctgctggcctccctagaagacaggagtccaaaggcctgtctttgggccatcctcgccctgctccctccccagcaaagccccagcctacagaactgtctgcttctggtgctcccaggcctttggctcccactggggcctggactgtgggagccacatggagcccctttacccctcttcttgcaactcctagaaggcacaggggctctctggcatgtgagggacaggcctcagccatcccatgcagtatttgccatgctcctttaatgctgtatccgttccacattgatctttttggtgacaaaaaaaagatgaacaaaagatgttccacagtcatcgtaatcacaaaatacatggctattcatttgtgaacctccatgcaatatcctggacacacaaaatacgtggctattcatttgtgaacttctgtgcaatatcctggacacacaagagaaaagaaaaacaatgagcaggaaggaaaaccaagacaggcaaaaagcaaaagcccgtttaatctggccgacacgacggctcgtgggtgcctccattttcagcccattttctgctttttcccagagcgactgaggagagcagctgagatccgcggcctgtgccctcagccactgtgctgggctccttgatcctctctgtccctcgacttccttgtctgtaaaatgaatgggttgcaaaagtaattgaataactctgctggttgtataagttactatctgtacttagaatagcatagcgctggcacctaggcaggcatgcatatcacatccactccctatatggaggccagggagagtgagagggattgacaagcagctggattgtcagttgacgagcaggtctgccaaatcagagctgttcaacaaggaactccccagacctgctggtctcttggggtaaccggcctgctctgggtaccaatgtgtcgctgacagccccttcccctaggggaacagttctcaggcccttctcatgctctgaaggcgactcatttcaaaacccatcagccaaacaccaaggaagtacttagcacaacattcgtaagttttctcaaattgccgtgtatcatatgctggagttgagagcgcatagtgttccatctgtgaatgttattagttgatcccactcctgaaagtgaagcatttttagctgacaccaagtttctgacacatgggcatgtcacttcaggattgaagctgagaggagttcactccaggtaaaaagaggggttggctgagccactcagtttagctcaggtgtatttttttcttatttaaatatgttatcttttcagctttattaaggtatagttgacaaataaaaattgcatatatttcagacatgcagcttgttttgatgtatgtatccaatgtgaaatgctcgccacaatcaagcaaattaacagcgggtccaccatctcacatagttgccattttcttcctccacccccaaatgatacaaagtttcagttatgcaagatgaataagttctggagatctaatgtacaaagtggtgactatagttaaagacactgtcttatagacttgaaacttgctgaagagggtagatcagatatttgggatgaagttaggtacttaaaaatacatgtatgttaaagtagagcttgtttaaaataacaataaaacccctcagcttgcagaagcttcctaatgaatagtcggcagtggggctgccaagtgtgcagcgtgtgtgtgtcgccctaagtgtgctgctaggggtgcaggggacattgctcattagcacctgctgaagggtgagtggcagccctggtgctggccttgggttgataacacttaacttggagcgaattacttcgttttccagaccaacgttctgccttgtgttctggagcagtttggtgtgaatgttcttttccaaagggccacgtgacaccatgagctcacaggatgactgtgcacagtccctttgagaattctcgtgtccagatgatggctggacgggtgatggcatggcacagggacagtcagtggggacagtgcggaaaaacgagcagaaatgggctcagaagtgggattttgttttcttgttcttgtcctccagagctgggtgagattaaaaacatcaccaccacacagccttcactggagctggacgggctggaaaagtacaccaactacagcatccaggtgctggccttcacccgcgcaggagacggggtcaggagtgagcagatcttcacccggaccaaagaggatggtgagagacgggtgggcggtgggtcccagcagttgctggaagggctgggtcacagagagctcacttgcctttaccctgcagttcatcaggctattctcagtgcaaacctttgctgccctcccaaaatatcccagtgcaattcagaccattaacttcctctcttgcctttgcttgatgtgtctaatccattgcttcttcttcctctatattttttcttctttcttttctttttttttgttttttgttttttttggccaagtattattgtaaatagaaactcattttatcctagagctgtaatacttgtcatacatgttttgtatcttgttagaataattttagtagctattcagctattagtgtaaactctgattaaatccatccttccacttcttgaaaattatgtacagactgaagttctattattctttgccagctgaatcactttagaataagtccttaatttgagaacttcatgttaattttttttaattcttgcaagaattcatggtgatttagtaaaaatttaaattgctgctcattttgttctacaacaataattcttgctgttccttacaatttggattgggttgtgactattacccaaacgtacaaaaaccatacaacaaaggttctgtattattttaagggaaactctgaggggccttggccaagcctgtttaaggaacagataagttctgataaatactaccgtggtagtgagaaaagtagcctccaccttaataaaggaaggagcaactgatgtcaaattgatgcccacatagaaccttcccaaaatattccagcacagaagtatacattgagatgagacattagcagatctaaatgctgtgctggattgtctctgcaacttttgtcttcttgccgggactctgttccccaagcagtacaggggcgggaaagctgttggccattgctggtcacctcctgtgtatgggcaggtttgatgtctatgctatctcccccactactagagtatcaaaaatgctgttattccatcccatatctgctctgatggaagcaaagaacacctgctcaggggccatgatacgctcttctcttcagcctttctgcccctgacaatgactccctgttattctgagcctgccatcttccacgtcactctctgctctcaccttggcaagccaggccttgctcctccgagcagccccaggcatccactctcacctggtgtttttgctgcctctgtagcccttctcacattgtaatgtctacacccaaactaatcctcatttgctttagtttttttctaaaatgcacaggtagtccttccagggaatgtgcaggtgtcagccagttctgctctaagaaattggattatttagggaatctaaggttcaaatgtaatgccattaggaagtcacacatcaatagagatatctagaaagctaagtcctgagtgaaggcagccataagttaattttttaaaaatgtaacagacaaacagctgtgcaaatgctggctctgtcacctgctgcccgtgggtctttgggcaccttacctaagtgtctctgaactggattgtcctcagggacaatctgctgtagccatcagactgcacagaaccagtgtatgagagctgaagtggtgtctgaaaacacctgcttgccacagagtgggatgcttcctgaccctcaatatttgattatttgctctccactccttcagagtaggggtgaaatactcctttttacattgctaggcaataatgcaaatgtcactggaattattatttaaagagcaaattgatcatccacaaaatgttttgcatctgcatttttggaagaatgtacagaaatccaataagaagggaaggctcttcacagatccttattaactcacaattttagatcaatttttaattaatattggagttttaagaatcatggagttctgtctcaaaacttgaccccaaggcccaaggtctaatttgtcaatcaattatgctttgcttttgtctccagtgctgatagtgtatggagctgggattgactatcgaaaaccctgccttgggtaccccagttaccccaaggaagatgccatgaatcccacttttgctggtggtatgggacaaggactatgcagaactgagtgtcaatatttctttaggataagtctgcattttcaaaaagaagtggagtggtggatcgcttgaggccaggagttcgagaccagcctggccaacatggtgaaaccctgtctctactaaaaatgcaaaattagccaggtgtggtggtgggcacctctaatcccagctactcgggaggctgaggcaggagaatcacttgaacccaggtggcagaggctgcagtgagctgagatcgtgcaactgcactccagcctgggtgacggatcgagactctgtctcaaaaagaaaaaagaggtggagtgaagattgggtggaagaagagaagaactagaataatatcacttcatctcccaggttcacatgaaaaattcaataatttagaaacggtgaagaattgtgtcaaccacttttgtagactcaatacctaatataattaggcatttcagcagtttacagaattaaatgctattttatttatctgattggaagaagggacaaaggacaattcagagaacaaatgcccagtcaaattgattacagatcgtatttatacttcaatgagaaagctttgtaattttgaagtttggattacacttacaatttcaattaaattgtgtaaaaatacagatagatttccagtaaaataataattaccaacatttgctcagttctttctcaataagatactattttaggctcaggttgaagtttcagcgtttatcaacgttcttgcaagcgaagaaagatagctacattaacagcgagcatccgattcagttgtctatgccagacacacgtcctgtaccagtcttcctaatctagggagcctggaggcttaaactgtgttattaggtcactggtcatactaaaaagagaaacttaaccctaataaaggcaaaattgtacttttgcaagggattatttgcaatagaaatatttgtttagaggacaagtctgtgcttgttctctacaggtagtttctctaccactatctaaagattcttgggctcatagtcatattcacagttccatggacacattctcatgtctgtggtcataatctcagggccatggacatagtctcttatccataactatagtctccggtgcatggacatattctcatgtctgtggtcggagcctcagggccatggatatcatctctcatccgtaaatagagtctcaggtacatggacatattctcatgcctgtagtcagagtctcagggccatggatatcatcttttatccataaatatagactcaggtgcatggacatattttttggggtctgtgactactgctcacagttcacgttctctttccaggactgctctatcagtgagaacttgtaccccattattgctgcagaaacacgaaggacgacttggtgatctggcttttctgtttttgagcacaacagcaactaaacctgacttctaaaaacagttgtgaaatcctgatgccattttatttgccaatactataatacgagtcaagccgtaaggaaagagaacacaaacaaaatgcaatctattaatcttccaattgctgttttcactctgaaggcaaaagctagtttcagccttgatccctttacacaagagtaaactttgcatatgtatcaatagagatagttaagttcaaatatttactgaacacatcactaatgcacctaactctgaaggtacatgtgagagggccagcagcaggtgtaatatgtgatctctactccctccccaccatcaattagcaatctcattgggaggagatctgaaagtagagctaagaggaagcaaaaaaataagctgacatctggatacctctgaatcttctgaccacccatactttgagccatacatacttgtgaaggtgtggatagtgtgtgcctgtgacgtgtgctggggtgactatgtgaccacacctcagtagacctgaaagggggtagattgcatgctatgtttgcatagccaccagtggtgctgcccctcagtagacactgggaagtactgccaatccacactgctcaagattccagtgctctatagcctatggtagtgtgccatgtgcagtggcaggtataccagcaacacgacagacaagatgtcctagaagagattctaccatgtggctttccacactccctccactgcagtggatcccaaactaggttcttacctcaaactaggtgggcctcagcagtgcccagtggtaagcaagaggcccagtgggagactccattctctccctgaccccagcttcaagagccaccccacttccacttgtgttatgtgctgggtttccacatgatgatttggttaaaggatcagtcaaacatttaaagaatgaacactcttgctctagtgagaggaaaggccaaaaatactagagtcttatggacatgggaagagaaaagggacatatgtgcatgcttggtgggatgacagctgtgaatgtgacatgtccctccaggatcgtagcatctgcacggcacggcatggctcaggaaaagccactgaaaagttgtgggttcagaaggatctggctaccatggtgtaccacatatgtacatgcatgtttgtgcatgcacaagtcacacacacacctgcctgtggctgtttactaagaccagaaaaatgatggtgaaaaaaaatgaagctgactgcggtgtctgtgtgggtgtttagtcagacttttgtccgatattcatacttcaaaacaaggcaatactgtttcagaaaaatgattgtggtatttttacattaaggtatgttacaggagggcttacccacttgtatttattttctatgctgtggaacagattgctacaaccttaacacgttaaaacaatacaaatgtcttatctcatcgtttctaagggtcaggcatccaggtctggttgagctgagtcccctgctgagggtccgacagatgaatcacggtgtgagctgggcctgtgccctcatctgaggtcaaggtctcccaggctcacaggatatgggatctttttttttttttttttttgtttggttatgaggctggagtcaccagcttccagaggctgcctgttactccctgtcacaccccctacagcatggtagcttccttcttcaggaccaataggaaagtctcacatggcttccaatccctctgacctcttttgtctctgacctccatctcctcttctaaggggcgcatctgattaaacccagcccacccaggaaactttccttttcattaactgaaagtcaagtgattagaacctcaatgatacctgaacaagcccttcacctttgccacatggcacaacctgcccatgggaggaatctgtccatcatagtaacagatgccacacccattcaaggggaaggaatcacccaggcacatacactagaaggtaaggatcttggggacccattgtagaatcctgcctaccacacagacacgaatgaaatcatttttccactcttggaaaatctgtattgaggatctagtatgttccagatactggcccaggaactaaagatgcagagaaacaggatgggcatggtggggtttgcaagctagtgggggagacagacgttgatagatcacccctgagtggactgtgtcaagtgcaatgatgaagaagagtctcaacagagacatgggagccctgacctgacctaagctggtgatcagggaagacttcctggaggaaatgacgtgtgctagaacctgagagatgagtaagagttgccaggaagaaggcagagggtgggaaaaactccagacagaggcatcccaaggccctggatcatggcatcccaagggcccggggtgggagaagcaaaccacgttcagggaactgaaacagagctcagtgttggggagcaccatcagatcagggggagagcccaactgctgacctgtcctgtccatgtggacctccaaagggcccatcaagtgacagcaggaagagaattccaggtcctggttcttgcaactgagaagatgatggggccatttcctgagatggggcaagagaagcacaggtttggatagaagatggtgagtgctgttgtgactatgtcggtctaaggtgcccgtgtgaaacatctcagccaattggacacatgagacacagaagcatctgcagctcagaagggatgtccaggtgcattggaggaatgtagaagagaggattctctgaaggccacattctttactgcaatcaattaaacttaaatgcagaactcctctctatgatgcccaggaattcatgaaaacttcccaagtttgttttgaccttcataagaaaaactcagattaccaaaatggaatgtggtcactaagaatgtttcaagaaaatatgtcccagacagacatataccgttttttactccatcctatgccatctctgtcttctgcaactctcagtgtctggtgtttgtcattcaccactgagtcacaaagtaaaggctagtatcatttagtgacatataatccaaggacataaggatggttattagagatgatagctagaacttatttggtgcttactgtacagagaacaataaataaatgatttacatgaattatctcttataattctaacagtaaaaacataagccagcacagttattattgtagatttataaatgagggaactaaagattattagagaagttaatcagcttgtccaggacgtggaactaagtgctagagccgcatgaaaccagcagtgaggctccagggcccacacctttaagctttatgatgttgtccaaaccagaactaaaatgttaagttctagctctgaaaagattagctcagtcatccagaaaaccttccaaaatgccgtgttcttcaacttatctatgttgttattttattgtacaaagttctagtaaccatacaaggaaagactgtgtaagatagatcataaatccatgcaggaggagccaactgcgagtttagatggtgcagtaaaagtcccttgatcggctgtgacacaggcatgctcacggaaatcatcacttaaaacaaggaatcaccaaactttgcagtggccaggaagtacctgaaatgttgcattttaacttaaaacatataaatatgtatttattccctaatcattctctaatcacatgacttaggatcacttcttgaagttttgggtgaaaagattggagctctgtgccatcttttactccatgaactgcatttaatgtgtagcatctgcatttttcaactggtgtctcaagtaagagcatgtgaccatttaccaacgatctgtttgcaaattgggacaaatccacatgtcccattcttctcagtggtcctgaccaaacatagatcggccttcttctttctttcctttcttctttccttcttttcttctttcttttcttttttatccttctttccttttgtcttcccttcttccttccctccttccttccttcctttcttttttcttccctctttcctttcttccttccttccctccttcattccttttgttcttccctccttcatttctttctctttttaatttcttttctaacttacctctaaggaaggctttccaaagtagtcccattaactgtcatagaaacagctttctcttgcacttgaatttcattggtttacgtaattaattaacttacagtactacccatgacacgtacaattgtcacaaacaggttggaaacaaatacaactgactcctcttcagcagccattcaactggttggtgctaaactacttggcctcctaaagagaagctgtccagcaagaatgttcactgtggtgaacaccaaccaggggctttatggaaaggactgagagtgttggctaagctggggtgtctactaggattaaaatccccaggaaacgttcactctgcccttgttgttcaggaggaaccctggcagctctgaactaggttgtggatgtcttagacattaccctcacctgatagaggtttgttctcaagggattttttaacccaggatctatcatttatgtgtgttaccttttctagaccttccactgttagcaagacttgccaaaaatggattaccaagattttatattttcaaatggtgactatgtccaacccaagttagttctcaccagagctcttggttttgttatgcagacttagaagagtcaaggtgacgattatgagaagcacattcaactccaaaacaatttactgagcagttgcattgccatcaaagcagtaaaagactcacagatttctccaggggcttgcaagggacttctattggtttgaatttcaatgtctccatcaatgtggttgccctccatatggacagtgaggttaatgagaaacaaagcaagagctctgatgccttcctcactggcacctttgacattttggcatcttcttgtcttggccatctcacccgccctcacctcttcaacctggaaaataaaagaacaagaggagtgggacatgccttcaatctcactcccaaatcatgcttagtattgctgccaccatgttctgccttcttagctggtttacagaggagagtttgtcttacatggatactgtgaatctttgacccaataatccctattcatcaacaatatttccatacctctcctgagcccaaagtggtgccattacaaaatgactagggtgagggagggtggggtctctgatggctgaggtagttcaccctcatgcttctcaaattcaggatccaaaaggttcatccccagtacattcaaagccaaaaactgcagcagaaatgagactgatccagaagttaattctccagttatccagaggcaggaagttgccaggggctgaaatgggttgggaagactccccaggacaagagggactagaactgactgtattaggtcctagagctacaaaggaccacagactccaacattaggaatttatttgctgtctctgagttctggaggccagaagtccaaaatcaaggtgtctgcagggctggttctctttaagagctttgagacaagcatctgtcctgggcttctctccttggcttatagatgccctcttctccctgtgtcttcacatcatcttccctctatacatgtctgtctctgtgtccaaactggccctttttataaggacaccagaagtactggattagggaccaccctaacaaactcattttaacttgattacctctgtaaagaccctacctccaattacagtgtcattctgtggtcctgggggttaggacttcaacatatgcatttggggggacacagcggaacccataacgctcatcctgaaagagctgaacagtaagtgcggagtggggtcatgttgggaagcgtgggtccgcaagcccaagttgaggccccaccttgtgactaaacacacggctcttccagttccaggtcctcccgcgggtgtgaaggcagcggcggcctcagcctccatggtctttgtgtcctggcttccccctctcaagctgaacggcatcatccgaaagtacactgtattctgctcccacccctatcccacagtaagttggtaaataaccaagtgcctttcaagcgtctgccagggacgagctgcaggtgctcgcactggacagtttcgttcctttgtttcccacctacctgggtctttccagtggttttgttttgcccctgctgtctccacatacaaaacaaagtcctcatttacacctcatttgaaaatacgctcctgaatcatgacaagggggacaattgtctggaattattgtttatttggtgagttcccactaaactgccagcagcctgatcaaaatcaaaacccagaggccttgattgtgccttaattgatagtcagtggacaacacctattgattttactgttggactcatcatgataagcacttcacgccttccctccctcccttctccctccctccctccttccctccctccttccttccctcccaccctatccctcccttctttccctcctccatctctcacagggaaaagaatagcaggcaaaaccctattgtgctagaaatgagggactttaatgaagatctattacccttacagttacagcagtcagcctggttcattgtgaaggaactaaaagttatttactatttcaaagtgtggtttttgttatcgttcatattattcctgctgaataatcattataaagttagactgcttctgagaccacaccaaaacatatcaaaaagggaaattttaaagaaaagaaaacattaaaatgacccaccaaaattgacgatgtcttcatggaaacattatgacattttctgcagcaggtgccatgtctcttccatctttgtatctccagctcccagcatagaacttgacacatgtagtcattcactaagcgtttgttgagtgaatatacacactggttttgtttcctttctggtaaaatacacataacgtaaaacttaccctcttgaccactttgattattgagttcatcagtattacataccttcacgttgttgtgaagccatcaccaccatccatctccagaactctacaaaaccgaaactctgtccccattaaacacgaattccctatcctccctcccaccagcccatggcacccaccattctactttctgtctctggatttgactcctctagggacctcatgcatgtggaatgatatagcatttgtcatttagtgaccagctcgtttcacttgacatgatatcctcaaggttcatccatgttgtagcatgcgatggaatctccttccttgttagggctgaaaaatattcccaaacaaatttatggattaatcttttaatcaaggtgatatgtttgcccaagctcagagtccacaggtgcccctgaggcctggtgtaccccaacagtgagtgtgtgagagtgtgtgggcttgcttggcccatgaagttccgtctgttgctgaaaaagcaaggtgtgttctctactgcttatgcattcatggcagtactctgcccttgaagtcaatatgtaaacgtaaatagtcagagttagactccacaacatttttctgggcttcttatgtggttttcaatatgctgttaatcctcacttactgaatcctactatcaaagcccagagatggagagcagcgtagacactgaaaaaaagctgagccattgtgccctcaatgcccagggtggcttctgcttttctgcttatcactgacatgtcccgtattcaccaaagagagacaaaaattattgctgaaataaagtatactcattttccactagaacttgaattgcatctgtattagtattcactcattcattcattgatctctttgctatgggattcacggttgctcttttgactctaacaggctagaaagcacctagcagggtatagaaagaccagcagcttcctctcgttttgtcttctcaatcatcttatctttatctctgcactaaaaatccctacctggcttacttgaaatgagtccttagtgactgatgcttactgagaaagcccctatttgtggatgatacaggctgtatttggctctgtcctcctggcctaagaattacatacaatagaaaaggaagaaaaaacatcctatcctgaaaacaaagtcacacaggtgttgttagatggggtagaaacgcatttccccaggatttctcctgtctcttcacccacagaacaatgggatttgacctgcccaggatcttaacaacacactctcaaaagggacagtaatgagggccagcaaggcacggtggctcacgcctgtaatcccagcactttgggaagccaaggcaggaggatcacttgaggccaggagtttgagaccagcctggccaacgtatgaaactccgcctctacaaaaaatacaaaaattagccaggtgtggtggtacatgcctgtaatctcaggtacttgggaggagctgaggcaggagaaactcttgaacctgggaggtggaggttgccgtgagccaaaatgtcaccactgcactccagcctgggcaacagagcaagactctgtctcaaaaaaaaaaaaaaaaaaaaaaaaaagacagtaatgagagcaaacccaccagaaaaaggtgggaaataacagctgagatttttatcagggtatctctgtgttgccttttgaccatattaaaaagactagagacatagaaatatgatgggcaggtgcctgtgttcttccaggagataatacctagaaagtgttacaaggaggtcccagaaccccagagcatcttaattgaagtgaagtgaactaaaaacagttccctctccatatccaccttcctgtctatctatctcaaccatcatttaagagcacgagacctattttttacatcaaatagtatcagtgagagtcaagctcagagacaattatttctcttcagaggtgaatacttgtaaatagtatccattattctgttttaaatatgaaatgatcaagaaactttaaagtacaggaaagagggtgtttttttgttttgttttgttttcatcagtttctgcaatttgactttcagtcggtaaactagatgctgtcaagttttccaaggcatttgcatttctggctatgtgtgcgaatgaccaccagaggacagtatgagctctagatattttccttgctcataaatctgaatttttttttctttgaaatgatttcatagttaaatgtagaacatagggggataaatcaggacacaatatgccttgtaatttggtcccttttataagagtccctcagctaacctcctcgctgatgtcattttctctcaagatcccaaattcatctccccttcttgggaaagaaccctgttaaaatagacaagcttttttctctaatatgtgacatataatgtctgctgataggcatttatttcatggtgctctctcagtttagcttagaaaaagacattagaatttgaaacttgcatgtggccagatgacaagttagggtaactgagaatgaatctacaaacaggttgtctaaagatgatgtggactgaacatgaactttccctcgggggtccaacagtgcaatgagatattaaactccccaatcagagattcaaactgcaaaatctcaaaagtcatttgattcagagcctcatccacataatttgtggattctggctattaattttaatatatagtggtttgaatgatcaaacaatctattataagcaatgaaaatccaaagacgtgagataacccttttaaggtcccaggaagaaaacagccaagcttcatttcctccccaacgctcccgtctacataaaagcagtctgaaaaactttcacaaacagactgcttttactatatacacattaaataagcattatgatatagacattgtctgtttcacaatgctaatctcatttgcggagcttagaaatgtaaaattaggaagcacagacttctcattaatgaaaactaaaaatcagaaggcataaaatatctctgagctgtgattcacattggttattccagcttcagatgataatgttattcagttcctgtacatagtaggtgctcaataaatgttgctgagttaatcagtgagaatacaccactactcttcttacccagaagacctgggcaattaagttctccacattgtagcccataacttagaattaaacaagtcttctgggaggcaaagtaactcaccaggtccagacagcttcccaccccaggcaacaggtgtgtgtttgcctcccaatcagccacagactgcatcaaataaagccatagtcaggctgagagcgaaaggggacttccgagaaccagaaatgtgcaggaatctcaaggagtggaaaagtggtataacgtggaatctggaaagcagcatctaacgtgctcatctgtatctacaatgatactcatcgctgtgttcattcttcctctctcacacggaacacggacctcctggctgtattaaaacgtcgttcctccctcccagtaccctccctatttcatgtcactgtagcatatagtgacgctactagatagcaatttgcttttaaaatcctccttctcttagcttccattatcatgttttttattctttgttgcttcttgtccctctgcttcccacccttaaatgtaggcatttcccaatattcttcctttatctcttaatattcttcactatctctgtggatcattgaatctgttcttataatgtaactatcatctgaaattaaagagttcgcattttttatctctatcctgacaatcttagagaaccgtcagtcctatatttccagcttaccaccatctgcgtactcaggaagacctctccagtacttcgcattcaatgtgcccacaaacacatttatacttgtgtctccctcttttcctgtgttctgatttagcttacgatctaacaaaatctgctgccttctgaccagaagccttcaagctacctatagttcctctcctaatcatttattcatttttaccacaaataaacatagagcactactcttacaccaagctctgagccaggttctgaatcacatcaatcaagagatgctgagttagggggcatcacaaacaggcctgaaacctcagtgatttacaacaaccatacaacaaccaatggttttatttttctttcacgatcatgctcattgtgagtatgtggtagtacatgccatgctatcttcactccaggaaggacccaggcaggtttcatgacaaagagaaagaaatctctgaggcgctgacataggcaggtaaacgctccaagcacaaatcacgagccagaatctgtcataagattctggtccatgtcttaaccacaaagggaccatgacgtacgctccaaacccatacccagaagttccagggaaggcaggaaacactagacaatgtcacccttctgtgtgatgtgacagaggacacagcaatgatgtgcacagcacagtgcaggagcgcggactgggtgtcactcaaacatacggccagagatggttgcttggaacacatagctagccctggcttgcaggaagagaagaattttacctgatgaatcagaggcaggaaagggtaatatgatcagaggaaataaatgagcaaagtgacatcatgtcacaagagctctctgcaatgtcttttttgttgtttgtttgttttgagacggagtttcactctgtcgccaggctatagtgcagtggcgcaatctcggctcactgcaacctccacctcccaggttcaaacgattctcctgcctcagcctcctgagtagctgggattacaggcacccgccaccccaccaggctaatttctgtggttttagtggagatggggttttcaccatgttggccaggctgctctcaaacttctgacctcaagtgatcggcctgcctcggcctcccaatgcaatgtcttcttaatctccttcctttcacacccaatgccattgccttgcttcaggtcctcccctggagaatcaaaaccaagtcagaagccttcccactgccaggctcaactcccagtctgttgtccacatccctgtcacaattcctttttccaattctgaatctgagcatgttatttcctagtgcaaatttattggatgacttcgcagtttttacctaaagacattcaaaattctcaatatgacctagatagatttccacaatccagctgcatctcctgtctagtttcatattctaaaaaccttcttccatccaatatctaagtaataccatgtctcatatgtgtctgcatttgtgcacgtgtgtgtatgtgtgtgtgtgtgtgtgtgtgtacacgtattgggtttttcttaccttttccattccatcctctttggtaaaaatgtttattgtttaaagctcaacttaaatgctgtatttttatttcaccactttttatcactggctacacattaggcaccgagtgccaaaagctttatacctatggtttttgaacttgccctatggtgacccacgatagaaaatataagttataatcacgccacgaaagtactcgcacaccacaaacttacatttactacacgtgatgccctccgatattttctgttccatttgactttttttctattctatttcattttgtttttaaagtgattgtcatgttccattaaattcctcctatgactcacatttttaaaaatactgttttgcatcagttaattctggtgactaccttacgcaggaggtgttatgattgttatcttcactcagtgatactgaaatgaagactctgcaatctggccagggtcacgcaggttagcaaaggaagatgggatctgcaacccacagcgggctgagctctttgtcctcatgcttacctgccttccctgggatcccagttccatcctgccccagtactcccagcactgactttcaacctcactttgacataaccacaatctcttgcgttattgttagacatgggcatagactggcaaacctggtattgtgctgaaatagtggatgttcctcaaatgtgtgttgaattaaattttatagatgatgactgtgagtcatctaaaagaggttaaattgtgtaatgaagctgtagcttaataaggcaagaaattgtgttatgtactttgggatgctttgtatcccagaaggatttggatcaagtgcctgtgcttttaaatcacttacatagaaatcattcttccatcattttatttaaatgacttaaggatgaatctttttttttttttttttttttttttttgagacagagtctcactctgtcacccaggctggagtgcaatggtgcgatctcggctcactgcaaactctgcctcccgggttcatgctattctcctgcctcggcctcccaagtagctgggactacaggcgcccgccaccatgcctggctaatgttttgtatttttagtagagatgaggtttcactgtgttagccaggatggtctcgatctcctgacctcatgatccgcccgcctcggcctcccaaagtgctgggattacaggcgtgagccaccgcgcccggtcgaatctctctctttttttttttttaataatggaaaatctgaaaattatggagataccacaagttggcctaaaaatagacaattgtattccatttacgcacatgtaatgaatcatatacatgagacctttgtgcagtgcttctacatggcaggcagatgctaggctctctatgttcttggatcaaccaaggattactgtagccccagcatcctgtcatggaatcatacggctggaaaaaacctcgaagggtttctttgaggcaaggctacatctaaatatcccagacatgtgaaaatcaattctggttttataaaatttcttgggaagtctattcctgaagctttcttggaaatatctttttatttcacggctagttctaatggaatgcagttcgttattttttcacttttaagttcaggggtaacgtgcagatttcttatataggtaaacttgtgtcacaaaagtttgttttacagattatttcatcacccaagtattaatcctaatacccattagtagtttttcctgatcctccccctcctctcaccctccaccctctgaaaggtgtgtgttgttgttgtgttgtgtgttgttcccctctatgtgtgtgtatgttctcataatttagctaccacatacaagtgagaacatgtggtatttgtttttctatttccatgttagtttgctaagaataatggcatccagctccatccatctctgcaaaggacatgatcttgttctttttcatggctgcatagtattctatggtgtatatttatcacattttctttatctagtctatcattgatgggcatttagattgatttcacatctttgctattgtgaatagagctgcaatgaatatatgtgtgcatgtgtctttataacataatgatttctattcctttgggtatatacccagtaatgggattgccaggtcaaatggtatttctgtcattaggtctttgaggagttgccacactgtcttccacaatgcctgaactaatttatactcccatcaacagtgtatgagcatccctttttctccacaacctcaccagcatctgttattttttggctttctaataatagtcattctgcctggtgtgagatgatatctcatcgtggttttgatttgcatttctttttttttattattatactgtaagttttagggtacatgtgcacaacgtgcaggtttgttacatatgtatacatgtgccatgttggtgtgctgcacccattaactagtcatttaacattaggtatatctcctaatgctattcctcccccgtccccgcaccccacaacaggctccagtgtgtgatgttccccttcctgtgtccatgtgttctcattgttcaattcccacctatgagtgagaacttgcggcgtttggttttttctccttgcgatagtttgctcagaatgatggtttccagcttcttccatgtccctacaaaggacatgaactcatccttttttatggctgcatagtgttccgtggtgtatatgtgccacattttcttaatccagtctatcattgctggacatttaggttggttccaagtctttgctattgtgaatagtgccacagtaaacatacgtgtgcatgtgtctttatagcagcatgttttataatcctttgggtatatacccagtaataggatggctgggtcaaatggtatttctagttctagatccccaaggaatcgccacactgacttccacaatggttgaactagtttacagtcccaccaacagtgtaaaagtgttcctatttctccacatcctctccaacacctgttgtttcctgactttttaatgatagccattctaactggtgtgagatggtatctcattgtggttttgatttgcatttctctaacagccagtgatgatgagcattttgtcatgtgtcttttggctgcataaatgtcttcttttgagaagtgtctgttcgtatccttcacccactttttgatggggttgtttgtttttttcttgtaaatttgtttgagttcattgtagattctggatattagccctttgtcagatgagtagattgcaaaaattttctcccattctgtaggttgcctgttcacgctgatggtagtctcttttgctgtgcagaagctctttagtttaattagatcccatttgtcaattttggcttttgttgccattgcttttggtgttttagacatgaagtccttgcccatgcctatgtcctgaatggtattgcctaggttttcttctagggtttttatggttttagatctaacatttaagtctttaatccatcttgaattaatttttgtataaggtgtaaggaagggatccagtttcagctttctacatatggctagccagttttcccagcaccatatattaaatagggaatcctttccccattgcttgtttttctcaggtttgtcaaagatcagatagttgtagatatggagcattatttctgagggctctgttctgttccattggtctatatctctgttttggtaccagtaccatgctgttttggttactgtagccttgtagtatagtttgaagtcaggtagcgtgatgcctccagctttgttcttttggcttaggattgacttggcgatgcgggctcttttttggttccatatgaactttaaagtagttttttccaattctatgaagaaagtcattggtagcttgatggggatggcattgaatctataaattaccttgggcagtatggccattttcacaatattgattcttcctacccatgagcatggaatgttcttccatttgtttgtatcctcttttatttcgttgagcagtggtttgtagttctccttgaagaggtccttcacatcccttgtaagttggattcctaggtattttattctctttgaagcagttgtaaatgggagttcagtcatgatttggctctctgtttgtctgttattggtatataagaatgcttgtgatttttgcacattgattttgtatcctgagactttgctgaaattgcttatcagcttaaggagattttgggctgagacgatggggttttctagatatacaatcatgtcatctgcaaacagggacaatttgacttcctcttttcctacttgaataccctttatttccttctcctgcctgaatgccctggccagaacttccaacactatgttgaataggagtggtgagagagggcatccctgtcttgtgccagttttcaagggaatgcttccagtttttgcccattcagtatgatattggctgtgggtttgtcatagatagttcttattattttgagatacgtcccatcaatacctaatttattgagagtttttagcatgaagggttgttgaattttgtcaaaggccttttctgcatctattgagataatcatgtggtttttgtctttggttctgtttatatgctggattacgtttattgatttgcgtatgctgaaccagccttgcatcccagggatgaagcccacttgatcatggtggataagctttttgaagtgcttattcggtttgccagtattttactgaggatttttgcatcgatgttcatcagggatataggtctaaaattccctttttttgttgtgtctctgccaggctttggtatcaggatgatgctggcctcataaaatgagttagggaggatttcctctttttctattgattggaatagtttcagaaggaatggtaccagctcctccttgtacctctggtagaatttggctgtgaatccatctggtcctggactttttttggttggtaagctattaattattacctcaatttcagagcctcttattggtctattcagagattcaacttctttctggtttagtcttgggagggtgtatttgtcaaggaattttaccatttcttctagattttctagtttatttgcatagaggtgtgtatagtattctctgatggtagtttgtatttctgtgggattggtggtgatatcccctttatcatttgtattgggtgtatttgattcttctctcttttcttctttattagtcttgctagcggtctatcaattttgttgatcttttcaaaaaaccacctcctggattcattgattttttcaagggttttttgtttctctatttcattcagttctgctctgatcttagctatttcttgccttctgctagcttttgaatgtgtttgctcttgcttctctagttcttttaattgtgatgttagggtgtcaattttagatctttcctgctttctcttgtgggcatttagtgctataaatttccttctacatactgtcttaaatgtgtcccagagattctggtatgttgtgtctttgttctcattggtttcaaggaacatctttatttctgccttcatttcgttatgtacccagtagtcattcaggagcaggttgttcagtttccatgtagttaagcgattttgagtgagattcttaatcctgagttctagtttgattgacctgtggtctgagagacagtttgttataatttctgttcttttacatttgctgaggagagctttacttccaagtatgtggtcaattttggaatacgtgtggtgtggtgctgaaaaaaatgtgtattctgttgatttggggtggagagttctgtagatgtctattaggtccgcttggtgcagagctgagttcacttcctggatatccttgttaactttctgtctcgttgatctgtctaatgttgacagtagggtgttaaagtctcccattattattgtgtgggagtctaagtctctttgtaggtctctaaggacttgctttatgaatctgagtgctcctgtattgggtgcatatatatttaggatagttagctcttcttgttgaattgatccctttaccattatgtaatggccttctttgtctcttttgatctttgttggtttcaagtctgttttatcagagactgggattgcaacccctgcctttttttgttttctatttgcttggtagatcttcctccaaccctttattttgagcctatatgtgtctctgcatgtgagatgggtttcctgaatacagcacactgatgggtcttgactctttatccaatttgccagtcagtgtcttttaattggagcatttagtccatttacatgtaaagttaatattgttatgtgtgaatttgatcctgtcatcatgatgttagctggttattttgctcgttagttgatgcagtttcttcctagcctcgacagtctttacaatttggcatgtttttgcagtgactggtactggttgttcctttccatgtttagtgcttcctttaggagctcttttagggccggcctggtggtgacaaaatctctcagcatttgcttgtctgtaaagtattttatttctccttcacttatgaagcttagtttggctggatatgaaattctgggttgaaaattcttttctttaagaatgttgaatattggcccccactctcttctggcttgtagagtttctgctgagagatcagctcttagtctgataggctttcctttgtgggtaacccaacctttctctctggctgcccttaacattttttccttcatttcaactttggtgaatctgacaattatgtgtcttggagttgctcttctcaaggagtatctttatggtgttctctgtatttcctgaatttgaatgttggcctgccttgctagattggggaaattctcctggataatatcctgcagagtgttttccaacttggttccattctctctgtcactttcaggcacaccaatcagatgtagatttggtcttttcacatagtcccatatttcttggaggctttgttcatttctttttattcttttttctctaaacttctcttctcacttcatttcattcatttgatcttccatcactgataccctttcttccagttgattgaatcagctactgaggcttgtgcattcgtcacgtagttctcatgctgtggttttcagctccatcaggtcctttaaggacttctctgcattggttattctagttagccattcgtctaatttttttcaaggtttttaacttctttgccatgggttcaaacttcctcctttagctctgagtcgtttgatcatctgaagccttcttctctcaactcatcaaaatcatcttccatccagctttgttctgttgctggtgaggagctacgttcctttggaggaggagaggcattctgatttttagagtttccagttcttctgctctgttttttccccatctttgtggttttatctacctttggtctttgatgatggtgacgtacagatggggttttggtgtggatgtcctttctgtttgttagttttccttctgacagtcaggaccctcaggtgaaggtctgttggagtttgctggaggtcctctccagaccctgtttgcctgggtatcagcagcggaggctgcagaacagtggatattggtgaacagcaaatgttgctgcctgatctttcctgtggaaattttgtctcagaggagtacctggccgtgtgaggtgtcagtctgccccactggtgggtgcctcccagttaggctactcgggggtcagggacccacttgaggaggcagtctgtctgttctcagatctccagctgcatgctaggggaaccactactctcttcaaagctgtcagacagtgacatttaagtgttcagaggtttctgctgccttttgtttggctatgccctgcccccagaggtggagtctacagaggcaggcaggcctccttgagctgcggtgggctccacccagtttgagcttcccggccactttgtttacctactcaagcctccgcaatggtgggcgcccctcccccagcttcactgccaccttgcagtttgatctcagactgctgtgctagcaatgagtgaggctctgtgggcataggaccctccaagcaaggcacaggatataatctcctggtgtgccgtttgctaagaccatcggaaaagtgcagtattagggtgggagtgacccgattttccaggtgccgtctgtcacccctttctttaactaggaaagggaatcccctgaacccttgtgcttcctgggtgaggcgatgcctcgccctgctttgcctcatgctcggtgcgctgcacccgctgtcctgcgtccactgtccgacactccccagtgagatgaacccggtacctcagttggaaatgcagaaatcacccatcttctgcgtcgctcacactgggagctgtagactggagctgttcctattccgccatcttggctccacaccactgatttgcatttctctaatgatcagtgatgttgagcttttcctatgcttgttggctgcatgtaggttctcttttgaaaagtgtctattcatgtcctctgcccacgttttatcggattgtttatttttttcttgtaaatttgtttacgtttcttataaaggctgaatattagacctttgtcagatgcatagtttgcaaaaattttctcccattctgtcagctgtttactctgttgataatttcttttgctgcacagaagctctttcatttacttgatcccatttgtccatttttgttgttgttgcgaattgcttttggtgtcttcatcatgaaatctttgcccatgcctatgtcctgaatagtattgcctaggctgtcttccagagtgtttttagctttaggttttacatttacattttttaatccatcttgagttgatttttgtatatcgtgtaaggaagggagccagcttcaatcttctgcatatggctagctagttatcccagcaccatttattgaatagggagtcctttccccattgcttgtttttgtcaggtttgttgaagattagatagttgtagatgtgcagtcttatttctgggttctttattctgttccattggtctatgtgtctgttcttgtaccagaaccatgctgttttggttactgtagccctgtagtatagtttgaagtccagtagcatgatgcttctagctttgttctttttgcttaggattgccttggctgtttgggctctttttggttccaactgaatttttaaaatagttttttctagttctgtgaagaatcttaatggtagtttaatgagaatagcatgaatctataagttgcgtgggtagtatagccattttcagatattgattcttcctattcatgagcatgaaatgtttttccatttgtttgtgtcatctctgatttctttgagcagtagtttgtagttctccttgtagggatctctcaccatcctagttagcttcattccaaggtactttattctttttgtggcagttgtgaatgggagtttattcctgatttggctctcagcttgactgttgttagaggataggaatgctagtgattttcgcactatcctgagactttactgaagttgtttatcagcttaagaagcttttgggctgagatgatggcattttctagatatggaatcatgccatctacaaatagggatagtttgacttcctctcttcctgtttgaatgccttttatttctttctcttgcctgattgccctggccagaacttccaatactgtgttgagtaggagtggtgagagagggcatccttgtcttgtgccagttttcaaggggaatacttccagcttttgcccattcagtatgatgttggctgtgggtttgtcatatatgggtcataatactttgaggtgtgttccttcaataactagtttattgagagtttttaacatgaatggatgttggattttaccaaaagccttttctgcatctatttgagataatcacattggctcaaaataaagggatggaggaaaatccagtaagcaaatcaaaaacagaaaaaagcaggggttgcaatcctagtttctgacaaaacagactttaaaccaacaaagaacaaaaaagacaaagatctaactgtcctaagtttacatcatcctatattttacataatggtaaagggttcaattcaagaagatctaactatcctaaatatatatacatccaacacgggagcacccaggttcataaagcaagttcttagagaccatcaaagagacttagactcccacccaataacagtgggagactttaacaccccactgacaatattagacagatcattgagacaaaaaattaacaaagatattcaggacctgagctcaggtcctgaattagatggatttgataaatatctacagaactcaaatggatctgaaagatatttacagaactctccacccccaaacaacagaatatacattcttctcattgctacatgacacttactgtaaaattgatcatattaatcagaagtaaaacactcctcagcaaatgcaaaagaactgaagtcgtaacagtctctcagaccacagcacaatcatattcaaaatcaatactaagaaattcacttaaaactatacaaattacatggaaattgaatgacctgctcctgaatgactttgggggtaaataatgaaattaagacagaaatcaagaagttctttgaaactaataagaacaaagatacaatgtaccagaatctctgagacactgctaaggcagtgttaagagagaaatttatagtactaaatgcccacgtcaaaaagttagaaaggtctcaagttaacaacctaacatcacagctagaagaactagagaatcaagaacaaacaaatcccaaagctagcaaaagacaagaaataatcaaaatcagagctgaacagaaggagatagagacatgaaaaaccattcaatggatcaacaaatccaggagctagttttttgaaaaaaaaaataaaatagatagaccactagctaggataataaagaaaaaaagtgacaagattcaaacaagtacaatcagaataaataagtgggatgttaccactggccccacagaaatacaaacaaccatcagagaatattatgaacacctctatgcacataaactagaaaacctagaagaaatggataaattcctgaacacatacactctcccaagactgaaataggaagaaattgaatccccgaacataccaataatgagttctgaagttgaggcaggaataagtagcctaccaaatgaaaaaagcccaagattagatggattcatggctgaattctacaagatatacaaagaagagctggtaccattcctattgaaactattccaaaaaatctaggaggggggactccttcctaactcgttctatgaggccagcatcatcctgatacccaaatctggcagagatatgacaaaaaagaaaacttcaggagaatatccttgatgaacatcaatgcagaaatctcaacaaaatactgaaaaactgaatccagcaatacatcaaaaagcttattgatatagtttggctgtgtctccactcaaatctcttcttgaattgtacctcacattttctccatgtgtcatgggaaagacccggtggaaggtaattgaatcatgggggcggattttcctgtgctgttctcatgatagtgaataagtctcatgagttctgatggttttataaagagcagttcccctgcacaccctctcttgtctgccaccatgtaaaacatgcctttgctcctccttcgccttctgccatgattttaaagcctccccagccatgtggaactgtgagtccattaaacttctttttctttataaattacacagtctctggtatttcttcatagcagtataaaaatgggctaatacacttatccaccatgatcaagtaggctttattcccaggatgcaaggttggttcaacatactcaatcaataaatgtgattcatcacataaacagaagtaaagacaaaaactacatgattatctcaatagatatggaatgtggttctaaatcttctcagttttttgtgtgcaatttttgcctatttatttgacttctattctttaagaaagtggaagggaagtcgatgttgttttttataagtttatcatttaatagtggtcttttttccctgttatcctattcacagtgtctgttctcacactgctaataaagacatactcaagattgagtgacttacaaaggaaagaggtttaattgacttacagttcagcatggctggggaggccttaggaaacttacaatcatggtggaaggggacacaaacatgtccttcttcacgtggcagcagcaagaggaagtgcagaaccaaggcgggaaatgccccttataaagccaggtctcatgagaactcactcactgtcacaagaacagcatgagggtaaccacacccatgattcagttacctcccacggggtccctcccacggcacatggggattgtgggaactacaattcaagatgagatttgggtggggacacagccaacccatatcacacagtgaacaagccaataactactcaatctttctgttgaagctatatttcagttttcttctcatattgttctcagtggttgtttgtccactaggcattatgtgaaatcattcaattgctataactggtaaaatgcagatggcctatactcaaggtagaaatcttggcctttaaaattctgagcccaatcatgtaatttatagagcaaagaaaacttaagcatatactcccctaaaattttcatacagaaagaggccctggaaatctcttttgaagctcagtctcataagactgcctgcctgatttgtcagataacctgtcactaagcattctagctttgaggtagcattcattcagactaggtagcttagtgtatgccaccctgaatgtacttccccattgctgcgtagagctttctgattatccacaggctaaaatgcctttaaaaaacttgactttattttttaagcagttttaggttcacagaaaaattgagaagaaggtacagagattttccaaatgcccctgcccctactgcacagcctcccccactatcgacatcccccaataaagtggtgcatttgtaacaatggtggaacctacattgacacatcattattagccagtgttcatagtttatgtaagacttactcttggggttgtacattttataggtttggacaaatgtttgatgacatggatccaccattatagcatcatgcagaagtttcactgccctgaaaaccctctgtgctcctcctattcatcccaccctcttaacctctgatctttttactgtctccaaagttttgctaaaatgccctttttatcaattagcttttggagcttttggaagattgcagctttgaaaacatcttatctttttgacttggcctgacacagacatattgtactatttaaggaaataaattggctttaaatcatttttcaattaacactagtggaaagagctatttttttcaattttgtaaattctgcatatattatttttattactaagaattgtgtttctcattaatttcttgtatgtgagaaactatatgataacaaattagtttttttgtacagaatttgttgaataggtgacagcaatcaagttaaattaataatgtaactttgacagatagataattttcatggcaggtggtatgacaatgaaaaggggatgaggaaaaattgtagcaaagggagattatatcggttggaaagagcctgttaacataagtatctgtaatgccacctgggctaattggatggtgcttctaattctaaacaattacatcaagaaactagtttttctcatgccttctctggatatcaactttaatatagttgcaaaacattatagcaataacttttatatttggaaggccaaaaataaaatattttatatttgaaaggctttttaaaagtagccaatagtctatgtatataattatatatatagtctacatatagtcatatatatagacatatatataatggtatctatagtcatatatatatatatggtcatatataaaatattttatatttgaaaggctttttaaaagtagccaatagtctatgtatatagttatatacatagtctatatatagtcatatatatagtcatatatgtaatggtatctacagtaatctcagtgaaaggcagaggaaactaccagaattgcctggctgttatcccatttctaccaatgttggcctctcaacctatgcctttaggaagatctttctgccatgacatcttcttttatagatgggaactgtgaaataaaatggaaattagatcaaaatatattatacataagaattttaaaaatcttaaattaatgcagtgaactgctaattcttaatggaatccaggccatttctttgccactaaacaagaagatgttaagcattctaaaagttcccttaccctataattaaaagagctatcaattttgtttattgcttgggggagtttttttttcactgctgtggacattctatctatgaaatcacagccttcaagtttttttaattgcatgttaacaattagctatcagagctttttaaaacatcacatttccttatagaattagtttttcattaaaaagttaattgaaatttttaaaagtagaattccttttatatcagacaggctgaatagtttgacatgaacagcctatggctttgtagtcattttatcctcattatttcctatcgtactcaaatcatttctaggtcattactaaactcacctagtacaacaagaatttcttcagtgtattccagttactggtcattgagtcccagctctaagcaatgctctgaaccaggttccctgcagagtgagtagagggatgggtgagtaaaaggagtagagggatgggtcggggagcctgacccctggggagatgcagtaagcacatgcaagaccataacccacagtggaataaaggcaaaggctatgaaagacaaagggcagacttagcccctgattgagaggactagagaaggctctgcaaggtcttacaagtgcagctacaagctaagtaatgtgaggggttcggaaatgaatttggcaattattgggtaaacgtctagttttatagacatgaccaaagagtgtttaaagtgcctcactgtggctaattatatcttatttactggtcaaaagcatcttacacatgaaaagaaaaatattatatcaacaccacaaggcaacaataattgtggaatgaaggcaggtctagaagacgctgttcccaggctttccatgagttgaccctgaagcactaggagaaaactaacttcctcacaacccttacactcttttgactggaagagtaaactgtgcacatttagttccttaggaacccacgactctacccagcagacctaaagcagtaacatacaaagacaaaacgcttgaaatgtgaacgctctggcttgggtgtcacaagatttatcccatttactgtattttccactctggatacggctttggggaggcaaacatgtcagaagtcttgtaaaaccttgctataaatattttttaaaacaaatatatgaagtttccatttattttttaggcatcttataaatattcatccatgtcttcaactatgacagggttggttttagagaaaggttcaaacgagtttatatctaaattttagtaggaattggtcagacttctatggtgcctcattttaaattaatctgtttgccaagctgtggtcacttcttgctccccgggggcaggaacttgccttataatctacacactgcaactgaactcagtaaatgaccattaattgaaactcagtaattatttacaagcccttcctattacgaggcatgaagctaagaacttttgcctagattttcttcccacagcccaaaggagagaacgatagtccaacaagcttctatgtctggctcatggggtcctataactctcgccaacatcccttatccacagacctccatactttgaaggcagcagtgtctgcctggacccccccccaccacctcccacagtaaaaaccatgaccagcccactgtaagaatagtatttgagatggttcattacataagcaacatgcatattttacattttatgtgtgtgtcctcagaccaaatacccaaatcttcccctaagaacactgtggattgcccctgttacatgacatcggtagagcaggattccccaacccccgggctacggactaatactagggacctatactgcatgcttcttatgggaatccaactaatgcctgatgatctgaggtgaaacagtttcatcccaagaccatcccatcctaccacgtccatccatctgtgaaaaaaaaaactgtcttccacgaaatctgtccctgatgccaaaaaggctggggaccgctgagccagagagagccctgttcttctcatgccaccatgttatctggtggaccaagaaatcagtaacttggcagccacttagagcctttcaattgagaagtgattaattaataataaatgttggcttgcttctcaacttggatagagcctacatgtttaaacacattttagatgagaaataacaggctttttcctcagctagccaagaggaatatatgacagatgcaaaataattggcaaccccagtccacaaatgtcccatccacttcctcaagctgggcatagacagagcaggattaaaaataagccatggaagggaatccctggcattctggttcagggacatgggggatgggatccctcaagtccatgcctggcggcaacttcgtaatgttggctgtttctgtatttccacaggtcacaaaggaactcttatgtcttctcttcaaacaaatggttagcacaattactgtagtccactcaaaattaattcacactttaggcataacaaaatctaggatgactgacacgtctgtcttaactctaaagaagatgagactggagagttcaaagtctacctgaagaaaatgaaatatttaaatattaagaaaagtgtctctgttgcttccccacagatttctccttttgccacatttggttcattaatccctaagaaactccattgtgagtttgcccttctttataccgcagtgtttatctgttgtccttgatagcgaagctttgctttgtttctttaaaaaaaaaaaaaaaaaagattcagagtctctgaaatagcaacccagctgatatatcaggcgaaatctggaaatcaaagtgatcccttctcattgaacattctctatatttggaagagagtgctacgtaataaaatatgcatgtagaaattagcaagtcagtttacacactattggattgttgtgttggaaaatctggtatccaataaaaagaaaattaatgaaatataaatatagtccatgctatcctaacttaataaaatatggagggaaatatttcaaaaggagatgatatttatcatcccttcttttcagaacaagcatttttggctgagcattaaaaaggatttaatcaactagattggctccactacactgagagaacttctggttattttcttcccattttgctctttttttcttttttctcctacctactgttaaaatggttaataatgattgagttatgcaccatccatagctaatgattctgtttacaataaatactatataatttacactgcatccctctgttggaggcatttcatgcctatggttctctctctcaagacatccaggcttgctctgtcctctagggtcaaccagtaggcatccttaccctgcttcactctaggaggcgtggccagtccagcccagcctcctctcctgttgtgagcagggctaacctctgccactgtggttcgccattagccttctcaggtgtggctcacttaccaagctctgtgtccttcagactccaagttctccgagagattccctagagctcaaagccctcttccacccataagagggaatactcacagacctctctcaacagaaaatccttattcctgccccagcctcttttggagcctggaaatggatgactggcaaaacatgagaaccagcaagtcctgcccaggtggcctcacagctcttgttaggaaagaaggcactggcatctttaggagcattctcacgctttaagatcatcgctaaaacttccagagaacaggaagagtcaactttaatatccagttacatatattccaaagaaaataaatcaactctgatggtttaaattgttcagttatcaactttctgcttgcccttctactaagaccaggaaaattgtgcctaattatggcagtcctcagaggaatacacagtggcatcaaagggtggtgacatcagtgtaactaacttacccaaataaccaataggagccactaacagcttgacgttattatttttcatcctaacctacggagaaattaaggaagtttctatgaatataccttttttacttcaattcttgattagtcttctatataaatgatgaaacaaatcttgttgcataaaaagtcatattttattgttgattttagccatgcattatgttacaggcaaaaattaaagtgtgtgttttggaggtaatcaagaacgaattttaccttgtcaacaggataagtatggagttttaactaaaagctatgttgtctacacagaaaaagatctttattttataaatatatcttaatgctttcctgatgcttaatgttcagtaagagtaattgttagaatttgcacatcattaagctttgtaaaattaatttggcaatgacatagccttggagaatcacacaatgcaagtacatacagtctcaggattgtctctttggtttatcaggaaacaggccaaattccctctgaacttctagagggactaattttcccataatactctaagacgtgactggagtgttgtagtgggaggggggtggaggtgaggtgtaaatgagtgcatacacatgcacgtgcatgctagattatagtgatgtatctagggaatccatgcaagagtctctccaaatcatctgacactgtgtacccacaaattaaagttttgacaataagtaattatctgacattatgttttgttgaggaagcatgaggttgtatgacaattaagagatatagtgaagatttaaatcccctgtttaattgcatgactggtattgtaacttatgcagcctgctgaggcatgtaaggtttattgaaaagctaacaagagtaaaagtaagtccttcttgttttggtcacttctaattgacagcataaagtgtgaggaaatagcaccagacttgggaccagaggccctgagctggagccattgttctgcagttgtctggtcttgtgacatcagtgaatcacttactttctctgaacctcagtttcctgatctataaaatggatccagctccacctacttcacatggctttttaaggaacaattctgacctatctaggtctatgtctccttgaagttccattagttttgtttcatgtaataataaatcctaaacgtttattcacctaataaccaagcttcatatctttgaataataggtgaatattaggtgaataaatgtttagaattgttatgttctcttgatgaactgaccccattatcgttatgaaatttctgtctttattactggtaatatcctttgcttttaaatctattttgtctgatattactatagccattccatatttttttgattagtgttatcataggatatcacttaagttcctttatttttaacctatttgtgtttttatatttcaagtacatttctttctttctttctttctttctttctttctttctttctttctttctttctttctttctttttttttttttttttgagacagagtctcactctgtcacccaggctggagtgcagtggcacaatcttggctcactgcaagctccgcctcctgggttcatgccattctcctgcctcagcctccagagtagctgggactacagggacccaccactacgcccggctaattttttgtgtttttagtagagacagggtttcaccacgttggctaggatggtcttaatctcctgacctcgtgatccacctgcctcggcctcccacagtgctgggattacaggcgtgagccaccgcacctggcctatttcaagtacatttcttgtaagcagcatatagtcggatattgcttttatatcaggtctgacaatctttgcctttaatatatttagatcatttatacttaaaattattattactatgtttatgtttaactctgtgtagtgctatttgctatttgagttctgctgctgttgtgctacttgttgcccttgtcagtctttctctgacttctttggggttttttttgtaattccattttatttatcttattagttcattagctttattttatgctatattttgtaatttcagcagtttccttacaattcacagcatatacttttaacatcttagtgtactttcaagcggtattacacactttgcatatagtataagaaacttacaatcatatacttccattttttcctcccaacatttgtgctattgttaaacattttacttttatttatattatatacccacattacattggtattgtttttaactatcaaccatattttaataatatttaaataagaaataccatatatatgtatctgtataattacctcctttttctacttatttgtgtacatttatgtctctgtctatctggtattattttccttctgctggaaggactttctttaacatttcttgtaatgtgggtctactggtgattaattctttcagcttcttatgtatctgaaaaaagtctttattcactttcattttgaattatatttgttgaatatagaattctaggttgatttttttctttcagtacttgaaagaaatcattccactgtcttcttaccttgattgtttttcaaatgaaattggctgccatgcttatctttgttcccctttacacaacatttactttctctggctacttttaagattttctctctagcactgaaactaaaactcttgagtagtttgattatgatgctccttggtacagtttttttttttaatattcttgtggctagaattcactgagtatcttggctctgcgggctacagttttcatcaaatttggaaatttttcaaccactatttttacaacctttttttggtcctgtctctctcccctcctttaggaactccactatgtgcatgttaggcagcctgatatttttccatagctcactaatgccctgttaacttttttattctcttttctatgtatcatttattaatatgtgttgtgaacctcaaatatctgagacaggtctcagtcaatttaggcagtttattttgccaaagtgaggatgcgtgcccatgacacagccttaggaggtcctgacagtatgtgctcaaggtggtccgagcacagcttggttttatgcattttagcgagacatgagacatcaaccaattttttaacattggttccatctgaaaaggcaggacaacttgaagcaaaggcgggacaactcaaagtggggagggggctcgtgaggagggggcttctaggtcctaggtagataagagacaaatggttacattcttttgagtttctgattagccttctaaaggaggccatcagatatgcatctatctcagtgagcagagggataactttgaatagaatgggaggcaggtttgccctaagcagttcccagcttgacttttccctttagcttagtgatttgggggccccaatatttattttccttccacacctttaagttcactaatcagtttttctgcaatatctacgctgctgctaatcaagttcaatgtattttttatttcatgcattatagtttcattttgagtttaatttaggtctttttgtatcatatctacttaaatttttgaacatatacagttataataccgctataatacaattataactactttattgcccttgtttgcataaatctaatgtctgtgccaattatgggtgaattttgattgattgatttcttcttatgaattatgttttcctggaaatttttatgacagctttattgagatgtcattcacttttaacttcaacaattcagtggctcttagtatattcacagagttatgcaacccttaccactatctaattttagaacattttcatcaccctgaaaagaaactgcacgcccattagcagtcattcccaattttccccttcccctaccctgcccctgacaaccactaatctatgttgccatcgatctgcctattctgaacattttaaatgaagagaatcacaaatgtgtggtttcttataattggctcctttcacttagcataatgttttcaagatttatccaagttatagcatttatcagtacttcattcctttctattatctcataacactctgatatggcttggctccatgtccccagccaaatctcatctttaattatatagctcccataattcccatgtgttgtgggagagacctggtgggagataattgaatcatgagggcagtttcctctgtactgttctcctcgtagtgaataagtctcctgagatataatggttttacaagggggaaccccttttgcttggcctcattctttcttgcctgccaccatgtaagacatgcctttcaccttctgccgtgatcgtgaggcctccccagccatgtggaactgtgaatccattaaacctctttttatttataaattacctagtctcgggtatgtctttatcagcagcatgaaaatggactaatacagactccatggtatcgctgtgacatattatgtttatccagtcatcaggtgacacatatttgggctatttgtttgtggaaatattttagtaggtgttaaactttgtgaacttcaccttttggagtactacatgcttcaatttctataaattctataaatattcttgacctttattcttggatgtagttaagttatttaggaataatttgttctctctaagtcttgcctttaagaataattaggaaagactggagtggtattcagcctggggctaattatttcccctttgtggtaagacccttatgcactatacccaatgctcgaggaatcttgatgttttccaacccaactggtgagaacagccactactcccatccctgtgtgagcattaggcaccgtgacctccaattctttcaggtgtctttccctggccttgggtagtttcctcacatgcatccatggatctgctcagctgaatacccaagtaggaccctcttcaatctccagagcttgtcctttgtgtgtagctctctttccagtgctcttccttgtgaactctagcttccttcaggctctcagctctgcctccttagcttggaaaggctgccaacctcccgagttgaggaggtggagctctctattttatcagaaataaaatttacactgccctacaaattgcaaaatctctgcgattgtggggttttcttcattcgtttcccatctttcagagatcactgtcatttattacctgatgtgcaatgcttttagaaccattgttttatggatggtgtgtgttcctcagttgtttcaggtgggagggtaaatctggttcttgttactccatctcagccaaatacagaagtgctgtggcctgtaatgtaaaggggtaaattatttattggtggccatcaaagctgctgcagagaaaaatgtagatggtgggtcacttaaacttaccagttacattttatattgcaaagccagccttttagaggagagtgagttgagtttttttgttatgatatttaatatgttcatgaccattccttcgggaaatccatttttgccacatgcttctttgaatgtgggaacacttatgtctctttttacaggtgatcagcgagtttgaggcctctcccgactcgttttcctacagaattcccaacctgagtaggaatcgtcagtacagcgtctgggtggtggctgttacttcagccggaagaggcaacagcagtgaaatcatcacagtcgagccactagcaaaaggtaggcagtggctataaggacctcatttcctgttgtaacttgactgtttttaagtctctattttacctgaaataaaacttacactttcctaaaaatcaaataaaccagaatatcacattttagctcaagaaacagggttgtggctaacaagctctgagcttctgtcccatggaaaagtaattccctggaggtaaacacaaagctgagaatgagtggccttacaatggaagtgtctatgaaaattaggaaaggagccctcattcattccttggagtagctgaaaatcattacacggcattttcccaaggatgttctactttcagcaaaatcaggtatcacacttcttaatgagaaatgtctattttatagtctatggaatttgcaagcttaaaaatatttgaaaatcattcactatctgttgacagaatgctataagcaaagactttaagtaacagcaggaagtaggagtcaccaaagaataaaaagttccttaaagtgaatataatatcttcacatttgtacgttaaactggtccttaaaaagcacacgcaggcacggggtattcttgctcttctggtaatcacggccatccagtgtttccaggaaccccctaaattagcattcataataagtcaatttccttacgacacaattccaggccagcaggagttgcccctaattttgagttatagaacagtggcaacttattactaatatgttctctgatagcctgaaagacaagaatgaacattccaagattccaattttacctccaagaattctctgaaaaatgtgctttttaatgagatagttaagaaataggcagaataaagcagtgaggggaaaaaagaggggtgtcacattttgagctcaaatacagatagaaaataagtaagttggtaagggaaataaactgggggacttactttatgtattacactctttggtcatgatatccagccactccctgagaatgagaaaatgatgattaccaaggaaaatgttggacataaggactgagctgtgggatttaccaaaaaaacaacaaaaacaaacaaacaaaaaaacactgcaacaaaacacataggattagcaataatgtttcttcctttcctttgtgctttcaaagttctatctctagacacagccagaaaggcctggctagtgcagtggggtatgacttactcagtgggggaacaattgaaaactctcacagaagcaggtcttgcctggggaaattcaatgtcctccagtcatttaataagtcattttgagtgcctgttgtatgtcagggtctatgctggggacacagaggatttggtcaagggaggctgactgctgaaataaatgttccctaaatctcagtggcttcacataataatatagtccaacagaggtatttttggtcagggctctcttgggtggcctgttccacatggtgattcaggcatccaggccccttccaccttatgatttacaaccctggatttctcctcatttacagctaaatagatgggggaagaagggagtatggagggtttgatgagaggttttcatgagccagatacggaagtgtatacattatttttactaatatcctattgtctagaataaaggcatggacccaccagggaaaagaaaacagggtttggagagcccagaggagtcttttgagatggtttaagagatgtgttcactccctgaccccctgaagcttacagtttggtggggagccagtcagtgatatggtttgtctgtgtccccacccaagtctcatcttggattgtagctcccataatttccaagtgtcatgggacggacccagtgggaggtaattgagtcatgggagcaggtctttcctgtgctgttctcatgacagtgagtaagtctcacgagatctgatggttttgtaaaggggagttccaccacacatgctctcttgcctgccgccatgtaatacatgccctatgctcctcattcaccttctgccataattgtgaggcctccccagccatgtggcactgtgagtccattaaacccctttcctttataaattacccagtctcaggcatgcctttattagcagcatgagaacagactaatacagtcagtaaacaaagcatcacaaaagtatatgcatagagacaaactgtagtaagtgctataaagaaatagtgtgagaggacctcacctggagtgtcagatggaggacacacttggtccctgagcacaagcaaaggcggttatgtgaagagagaagaagtgagcagtcagaagctcctgcagagaaagatttagcaggtgggaggtccaggacactggaccctgctggggccggggaaggaacagtggtcccagagacgctgggaaggaagacagggacctgatcatgctgggttttcaacactgtgttagggatttcagattttgccgcaagagaaataaggagatggtgtagggttttaagcaagggaggcacatgatctctctttctctctgtgtgcatgtgtgtgtgtgtgataaaccttattttttagaacagttttagatttacagaaaaattgtgatgatagtacagagagttgccatttacctcacacctagtttccctttttatagacatcctaattaaatgcctttcttacaactaatggcgggtgtgctttttaagaccacctggtctctctgtcctgaatggactgcagagaggcagaaatggaggagggtggagaaggagatagcaagaatgaacacccaaattctcacatgagttagcataagtggaggcacgatttcttgatgaagaagaccatggaagaagtggattttgaagccagtgagaggaggtacagacatttggaggggttcaatccaaggtgacgaagagccattcactcagaggcatctgtgcactgaggcatgtcctggctctcaagagacatctggcaggaggcagaaattcaggcgggtcagcgtctggatatcgcttacacctgggatgggaatgagattggctgagagatggaggagagatgaaggtgcaggacggactctcaaagggagtgggagcaggcaaaggaaaaggggaaaagccagagaggcagcagagccaggagggtgttaggctgtggattcaaaacagatgcttgcaaaaggagggagtggtcaggtgaggctgctgctgctggaaagtcaggcaaaaccaggcgaaaatgcccctcagtggccacacggaagatcgtggtgaccttcctgtgagcagcatcagtgggtgtggaggggcatgcagaaatgagcctgagtcaggtgagaaagtgggtaggaggtgaggggcaggctgactgggcagaacattccttcaacacacatcacctggaagaagtgacaaccaagagaagaagctgggagggggagggaggctctcattcgaggaaaggctctgggttcattatttttcatgaggcctgccatcagagcatgtttatgtggtaacgggaagatcccagtagagagggagaaacgagaaatcaacaatacataagaaagagcccacgaccacagcactgaggtttagaggaggaaatgccagtaggttcacagatttggtggctggaaatgcagggttcctggatggtgtctctgaagcattaggcaatttggggatagtggagggaagcccagaagtgtgagaagaggagggacagcaggaagccatcgttgcagggaatggggaggacatttactaaagaaacagtaagaccagcagggagtgctgacagttcaattgaggttgatgatcctaaatggtggtcaatctccaaatgctctattgcgtggattttttttccagaaatgttcaacttttcatgcttaagggaggttgactcagggttaggattgctgtaggtaggttttctggaaaggggataagctagggagtgcctcaggatggagcagacagtcagttgggcagcccccacccagaagcccagacactggcaaaccatgaaggctgaaaggcccatcctagagggatggggatgtccacagcagaggagattgagacaggttattctgtagttgttgggaagtcaaggcagaccagcagcagtctagcgacaggtagcagggtccaaaattcagatacagttgaagaagaggaggaccactgcttttatggagggagtggcagaatggggccatggcactggtcctgggggaagcccctcctaggaaggggtccaggacacgaaggcacagagagcctggccccatggctgagaacaaacgggacccgaatcagaggggacaccaggttgcagaggggttcagtttctcatcagaatcacctgggatgcttgtcaaaaggcagatgccccaagtacaggaaagagctgctgaatccacaaggctgtggtgggaacctgcattttaaacaaagattctaggggattctcttggctgccccaggtctagtgtgttgagttgcccagtcatacatttctggctagagaccctttaaatttcagccgtctaaaatgggcaaaatgggcattgagcgatagcatgggggttgttgggcttgaagatgaagtagctctagcttgtattttttaaattgctaatggaaaagcattcataagtcctggagttaatttgaggggttatgcccagaatgttaaagaacaacaatggaatagagtggaacagagtcaaatcaactagactagactaaactagggtttaaaaaagacagaaaatatcagaatgcatcacatacagtgaagtctttattcatgcaactttgtttgcacatacacaacatcccaatgcatgtgtagcttctggagtttgatgtaaaacatatttcttaaagtgggtgactgttataaagctggaaagcccctaactctagctgaatttctctagccacccgccttttactgctgaggacattctctactctctaaagaactgtctgaagtgtgtgaaaaagaaaatgccaaaagctaccaatgcaggaaatctgatgctgcctaatcaggacctttttgttatcatgatgcaaaatcagaaatgtcaatgactgatgaaatgggccctgccttagaatacttcatctcagtccagggaaattgcttgaaacatgggttttgctgcaacaaaaaacaaggtccagcttctaagccctctggcattttctttttctctctactcttgcccacagtgcccagaggcaaaaatgtatgatttggtctggtagatcctagtgactaatgtgggtattctatactaggatggctgcataatgacttggctctgggtactctgcccttccagggattctagagcttccctgggggagccttctcctcatcttcctttgccaatgcaaaccctcaacccagaaatggtgcaggggtctcacatttgtcccatttttatgggctctgaatcagttcaaggctgccttccacctatggtttccggtctgtgcatccatcgagggtgagctcctgtaggggcacctgtttcctctatgtccccagctccatgacagtgtctgaagcatactggctaaaacaaaggacaggagaagccccgggctcctgtttacaccccagaaagtaatgtcccaatgtatggcaaagactgagcagattgttttcctctggaagacttgtgtgtggtgtccctgtcagcttttgtgactcactgatggaggtagcactagaacctctcattgctggccacactggacttcaaggcaagttcaccctgggctttttctgactgtcttctgggacttctgctaccttggggctgcaccagtaccagatgcccctggcagatgctcctgtttgggcatctgaatcactgttccaagcaaatggttgttcttcaagagaggccactctgaaaatgttcattctccttaatgtgtgtcctaaagatcaacttgctataatacagtcgggaaattgttaagtagaacttgttccagttttactccttcccgtctttggggcctttgtgttttgtattgtctactttctctgatattaaagtatattttaatgagcagtttttgtgttgaggtaaattgcttcctaaagtgctttgagaaataattgggctcatagaaaacacagcttggagctgcttggcttatgaagccctagatatttaatttggactcctcatgtttagtcaatagaagaaaagaatgctacaatgggaattttctgctagttgtgtgttcttacaatgacaattcctcataacccgggtaccagagagtagtgttgacagttgtaatgtgaattggcttcacatccatttttaggtattgcccttattgagtaggtcatgttggcctctgtgtagacacgtctgtggagtaatcaggattccactttgtttggttcctcagctcctgcacgaatcctgaccttcagtgggacagtgactactccatggatgaaagacattgtcttgccttgtaaggctgttggggacccttctcctgcagtcaaatggatgaaagacaggtaaccagtaacccaatgtatgccttcagtgagactctaagagattacatctgacatactcaggttgtgtctagtggtctcctaattttgtgtttatttatattagtgaaaactcaaggaaacctaccaattcttctgagatgagggcagagaaggaatctcagctttagcactgaaagggtctgatttattgtatcaaccctctgttaattcagagccttctagttcatgagagaatgcttgcaaggaaagtagttgaaccaactcaattattgtggaagtttgctgcaccctctcaggtaaattgtccatgtaactgagatgaatgcagccaaggctattgtgagatttaacacctatctcttcttctttaaagatagtgaactaaccataactcaaataccctgagaaagaactttaagaaatggagtacattaggactttgctaatttaaaatctggttctccatactccatagtaattatttaaataataggagccaagatagagggagagagtgagtgagatatggtctgtccatataactttttaaagtgctatatctctattcaggagaagaaattaggatataagttaagggtcgaaaattcatttatgagcatagaaatgtgatctaatggattcagaagaatgcctattttcaagcaaaagcacttagaaggcataaactgtagaaataatggcttggtgtagtgaccaaactgtagaaataatggtttggtttagtgaccacttttctcatacatttaaagttggttcatccaaatgaaatatgtagctcccaaggtcaagttggcattctgcctgttgtgggaatgaccccaaaggactggacaatctgccaccggagcagtggttatgatggccacgcagttctttttatactagggtaaactcatcaccctcttgagatatcacatgtcatttttcatgtcaaaatcatgaataattgtgactttaagtgaatctaaaaatgatcccaaggtttagtttcccctgtatgatttgttcaaactggcacttctgcctacagaagaaattcccagaattgccaaaatgaggatatctccagtgcccacagagtggagtaaagagggacccatcagtctctggcacagatgaggagtccactgacttgagccagaatctgggcccttgacacagatctcatcttcaacgtaacattttttacaaaggaaaacttcagctacacagctattgattgttttcattatgtaatcatatttagttctttcataatgcaagaaatatgaagcttccaaatgtgtggtttgcttcacagagtctttctgtttttccccaacctcagctaatttggattgtaatttctttaatctgtgcatttttcttcctgtgaggcagtaacgggacacccagtctagtaacgattgatgggcggaggagcatctttagcaacggaagcttcattattcgcacggtgaaagcagaagactccggctattacagctgcattgccaataacaactggggatctgatgaaattattttaaacttacaagtacaaggtacaacatttgaggactctttttaatgatatcttttacatgtatgctttctatgcaaaaagtagcactgaacaaattttaaaatcagcccttataaagagctaacttctgtttccatattacagaaaaagaaaacacatgttcattttgcaaaatataattaaacaaatcaaagaaaatacaaagcattcacaacctcagaaatactgagatacaaaacatctttgcatacagaaagcctagtctcttttttctttatgtgtacatgtctaaaaaagtccttcttaataatttccattaattgcactgtttactctacatatatgtaagtgtatcccagaaaacacaaacaaaaaacaagtctgaattgtggtcttttttgtatgctaattaactcaatttttatatgcaatgtattttaaaaaatgaaagtaactggagctctaagtagatcgctgtagtatttagctatgtatttaatactaagtatttttcttgatatcatacacaaaatgtgcacaacttcaaaagattgtcatgttaaaattttgtgtaaatcccaatcaataagtgattgagttcagatttgtatgcacagcaatattttattagtagaaaaatcaaagtgtgtgcttctttggatttaggtgttgtcacattaatagattacagcaagtaaaaataaaatcaatactgttctcggtgggatggaaggaaaggaaaagaactatatttctaaaaatgctgcaaaattgatcttgaatttcaaattaattgaagtcaggagaattccagggaattttggaagacaggcactatattatgactctgaagagataggtcaatatattaggcttctctcagaggaaaagagaagggaattttatatgaagctttctatatgatttggataacctgattctgaatttctttagtgtttctgccctcagaacccatccagacttacttaccagtatgtattctacaagccttgtaagagagaccagttcatattctgcagttcaaaggcctgcttttgattttctgtgtgtgtgtgtgtgtgtgtgtgtgtgtgtgtgtgtgtgtgtgtgtgtgtgtgttgcatcttggagcaatagcttagaaagtgaagatttttgcaattctttttcccactagctatttttcctccttccccttttccatcctgagaagaacggaactgctaagtggatgccatttatctttttcacttaaatttcatggctgaaattcatagtaaaatgaggcatgtatccttagtaagtttaaagaagatttcaattagtgataaataactcagacagtcaaggaactggtgaggaaatgagttagatatgaatccaagtagaaatgtggctgaatttttttttaaataatagattcactccgttctatctctttagcccaggatatcaactaaatagacattttgacagaagtgaattgtatattttggcaaactgaaacacttatttaataaatggctgttaaaaatgagttggtaaatgactgttcaggaaagttaaagatgtgaaaaactaattcttgttttctaaaaactgtttcctctccagttccaccagatcagcctcggcttacagtctccaagaccacgtcttcctccatcaccctttcttggctccctggagacaacgggggcagctctatcagaggtaataagatatagattgtccacaatagttgattagttgtgtgatccacatgccaataagtgacacatcttcagcaaatgactggtatgtgttactttattctcccccaaaaatacgtcatataaacaatccctccattacctaagaaagaaaccatacatttatttttaggatatttgttgaaattcaaatcattcatccaaggatgctcatttaagagtgaaatatcaacagttgcaagaaagaaagaaaaaagaaatttggatatctcttttttgagattctaaacactgtttcttttttattttgtcaacacaaagtcattcatttatgtaaccatgggtactgtcctgacttagaaagtaataaaagacagaggacctaaagtgtagatgtaaaacaatctatttgcacaaaacctttgcaattagttcatagttgaggtgtataaacaagattttgttttgttttgttgttttgagatggagtctcactctgtcacccaggctggagtgcagtggcactatctcagctcactgcaacctccgcctgtcgagttgaagtgattcttctgcctcaacctcccaagtagctgggattagagacacacaccactgctcccagttagtttttgtatttttactagagacggggttttgccatgttggccaggctggtctcgaacttctgacctcaggtgatccgctcacctcggcctctcaaagtactgggattacaggcgtgagccaccacgcccggcctaaatgaggtttatatggaaggagtgagcatggtcgttctagtgtgggtggagttaagctagagacagaagatacacaggaaagagggcctgtaccataaaggaggtcccagggccggggagagagaataggggcttagacttcctaaggcagagaacatcctttcttctgagagagaaagaaggctgggaagtaaacaggaagtcaggagcatttcagagtgacatcagtagtgtgctggagcagctccttccagctccgagagtgaggtgccacatcccttcccagcttcatgctcagtggccacagccaccctaagaacattccctcaccatggaaatcagaaatgctacaaatcagagccttttttctcctctccaagaaccagttgttaaacatttatcagcactccaatgggtgaagggaagatcttttttttttttttttcttttaggaaagaaaaagtgaggtgatttttttaaaatcgtggtgaggatgtgtctgtggatttgaggagcatgggataggtttgtaatagctgccttgtggaatgcacagagagtcattaatagatgaaccgagtcattgccaagaagcttgcaaggacccagctgcagatgcacagcacaaattgtacgagtcacaattatcactgtctaatgactttcttttttgttttgttttgttgagacggagtctcactctgtcgcccaggccggagtgcagtggcacgatctcggctcactgcaacctctgcctcccgggttcaagtgattctcctgcctcagcctcccacgtagctgggactacaggcacgtgtcaccacgtccgactgattttttgtacttttagtagagatggggtttcaccatgttagccaggatggtctcaatctcctgacttagtgatctacccgccttggcttcccaacgtgctgggattacagtcctgagccaccacacctggcctaatgacttttctaaatgattctggacagctgggaagaaaagtggatcacagattaccagtaacataagcattgccagaagtctgaagagtgagagaaactaggctccttgttgaaatggcctaccaaaggttccaggctgactagagaaccttcttataggaaaaaaatagggggcacctagggatgggctcgagggaccctaggttttaggctcaaatgaaatgaggcttggattctacaagtgtgagagcatgggagaggtagaacaagaagggtgtgtcagagcacaaggtcttccagatgaagccagttttagtgagggagagtttccaagacaaaggtaacccagcattcctgaaacacagtagtggccaaagccattgccatcatcaggaggtgtcgtaagttgtgtgcccacactgatggacactgatggcactgaggatgatagcaggggacagggaactatacaggcctatcaccaaggattagaggagttttttgaggtggcttcgagggtggaaagtgggaggaaagcagagtccctacaatgtgtagggcggctggaatacaggctgggatgtggctgggagcaggtgcacaggtatcacctgtcaggtactgaaggagctttatggaggtcagatgaggaacacaaaggctcaggaaggaggagggaccctatggccacagaaggccagtggtgagggaaggctgaaaggagtaggggagatactgacaatgacctcagaaggaggcatcagagatgagtgatcgccatgtaaggggtgtggaaatcagcaaacctgcccatttgggtttaggagacactgtagtgtgcagggaaaaaaaatgctttatttttattaaaatggagctccacaggacaggaatagaaggtaccaacccgttgttgcaaacacaccatgttccaggccagctagccagggtggagaaggaacatggctgcagataacagggctgaaggagttaacaggaagaatatttcagcattcacaggggtgaagaacatgggcttcaggctgactgcaggatctgcatcctcctttcagcacttgggactcaccgcttaactgctctggacttcagtgtcccacgtgttctgtgggagagtcgtcactgttccatagggttgcagaaatactgtaagcaaagggcttaggacagggcttggcatggagtgagtgctctagagtggacagtcatccttactagttgtaaaagtagaggtagtgctcatgtgggggaatgaattgttggaggaatttttcaaaccaaagagaagccaggttactgtcagaatagtgggatggctgcaagacttggagctgtttctcctagtgtctgtgaactgtgagaccaggagtacatgaggagtgaggcagttgaagaaatctctactcccattgataatgtatccctttcccagagattcgagtgtcttgcaaaaataacagcttcagcctatgtcttcactcaaggattcaggcatgtatgatctgagggacagatatttggcaacttaagtattccctgctgctcaatatggcttttagaagagaatgagcagaaaacagcaatacttcacagtgataatgtctggtgtggcccaaatgactcactaatcaatacatcatggtgcttctcccaggctgggttacatttcctggaatcagaaagagcgaaaatgttccttctgaagattcttcagttctgagaatgctcgttctattacccacacaaaatgcaagcatcagtccacttcccatagaaagcaaacacagtgctcatgtgaatctttctcattctctgcaggatacatactgcagtactccgaggacaatagtgagcagtgggggagttttccaatcagccccagcgaacgttcctatcgcttggaaaatctcaaatgtgggacttggtataagttcacactgacagcccaaaatggagtgggcccagggcgcataagtgaaatcatagaagcaaagaccttaggaaaaggtaggtatgccttctcatcgcttcttaatatcctttcttttcccggccagaagaggagattggaatcataaaagatccatcatgttttacgtttatgtgtttgaactttgtcattcctcacatggcttcagcagtgccacggcataatgagagggacagctggaccttccagagtgttctggtcctctcttttattgtttcatttgcagttaaaaagaagaatgtcagtttgaaaatcaagggcgttggtgtgaatgtgaggtgccaaggctgggcagccatgaagcgtggcgcttgccctctcagccgtttggaggcgcccttctcccttagccacccttgctcccaccttcctatcatttccacattgccacatagccaccgcttttcagagggaaaatgatggggtaaattgcgtttgttttttttttaatctaaaatgtggactttcaaggagatgaatcccaaagaaatcatattcagagaaagaggttttgtcccaggaactccagaaggaaggagggatgatgcagctctatgtgggcataggaagaaggtgaggagatgtctttgcaggcttccctcccataggagtcctaccaggtggggtggggtcagatggcaggagagcgagtaatgagatagcaagggtattatttgtgcctggtgccacagttttgggtaacaagtggtaagaggtcaaatgatcggggattgatttatgcagaaatatatcctttaggtccctgggcaccaagaccaagtgtttagttgtggaggaaaatctgttggtgcttcccaaatccaactctgtcttctcttgaatcaggttcatcacatgaggatggaaaaagtgcccagcacactgccccgcaaaccacagaaggaaacccatatgtgaacatcctattgttctttagggaactctaagataccccaaaataacctccacccatgcaattttctgtcacacacccaggtcattacagttggagaaagcctgttggtccataaagtctctattaacaggggacaagttgccagtggcctgtgagccagacttggactgagctcctggcctcgctggaggaagcagtccgagggaaatgcgtgaagatgctgatggcctccccatgtgtcctgtgagctgacctccatgtgccttctcccccagagccccagttctcaaaggagcaggagctgtttgccagcatcaacaccacacgcgtgaggctgaacctcattggctggaatgatggcggctgccccatcacctccttcacactagagtacaggccctttgggaccacagtttggaccacagctcagaggacctctctctccaagtcctacatcctgtatgacctgcaggaagccacctggtatgagctgcagatgcgggtgtgcaacagtgcgggctgcgcggagaagcaggccaacttcgctacgctgaactacgatggcagtaagctggctggctttgtggctctcctgcttgtgtcttgggggatgtgcacgtgggccctgcccctttcccatcgaacatcatctttgccatagtttgaccagtgcccacggagcccattaggctttcgggattcaatggactctgtctggggctccctagttcgttatatccagatgaccatcactgtgtgtccagaaataagagactcagggccatagggagtctcactggggagtcatggggcaggagtgatttctcttagggctgaaggactcttgaccctgtggttctgtgcttgtgttgatgtctatgagctaacattgcttttgttgtctcccacccctttccccacctcatcccaatccacataacaactttcttttttgcactcattacaccctaaactgcatgtgcaaaaacaattttccatggtaaaggagcttatgttagtctctgggcaggagcagggccactgatggaaataggataataataggaatccatgaacacgtgcacacacacaaactcacacacacttgccacttgcatttactttccaaaaactaggtgaggtgtctcttgacattagttaaccaaaaataaatggtttaaaatctcactcattttttctggtatcaagggccatttattgctaactgaacaaatgctaagcccagtgaagctgaaaggagcgagtcctcgactgcaacttagtaggggaactttagaaagtcccagcagcagcgggctgatgctcatttctcactaggggaacagcaaggattgagttaggtgctctaattgcaaggtaaaaacggcagcaatgcatcaggatgagttggaactccagtgcaactctcctcagagccttctattcactgcctgttggtcaggctagaccacagtgttgaatgagttaaccaagaaacacccaaaccctttattgacagccaagccaagaccacgttggaagtgctcctctacctgtgggtgatgctttgtgaggggatgcctttcaatgaagtcactcataactgagggctgtaaaattagacagaggcagcccatgaaaagcatcagcattgctctctaggagagtgattctttctttactttgtgcatttgggaggccgctttattaaagctccagcaggtagctccttggagcacagtttatgccatcctaagaagagtggctgtgaacctaaggacccacagaaatgaccaccaggagctaatgaggtgacattgcctgggattttcatcggaccaatttctcctataatgtccggatggcccagggctggctcttcttgctttggcacacagagcagacctaccccaaatctcctgtccaaggtcatttttccacaacatccttctctgccagagtccagggtcttcctggcacttctggcctgggtctcagggctgtaggaagaccttgagcttgtagaaagctcttctagtgttggttacgctagccggggtccctggcctctgcacgggctctgtcctatggccccagaatagcctatgccctcccagacgacaacttttctcttcaagggctgatgcttttcatgggctgcctctttctaattttatagccctcactcttcagtgacttcattcaaaggtgtccccatcacaaagcatcacccagaggcagaggagcacttccaagctggcctctccctgtaatatggttgaattatttgatcttacaaaataaagaactttgacacttaccagacactttacttagcatttaagggtgcaccaaaatcctctgttaaccagcacacatttgagtagtaagtatcttttttactttagatcattatcttgcaatattcacactctggttcccagcttctctataatatgtgcagatgcctgggcacccagcttaaatgtgcacactgatgatatgctcacagctaatgatttaattagaaactactcatgtgtagaatttgaaactgtgattctaattcacaaagtgttctgcggattttaaatgtttgtcttctaagaaaagatataattttctcactttatccaagatcccaaattttgaaaaatgctgcaagctacctttacgttttggaaatatgaaatcactttattacactaagaaatatggctgcatatttatattttccttgagagagattacagatttctttggaccagtctcatgaatggatagcctctattgtcacatctgcctgaagaactttgttatcttgagaaagccaagattggcagcctacattcataccactcaggtttcagagtcctccatttaatgatctcactctttcttctgccatttccttagccgaatgtttctgcttgacctagtgttgtcttggttttgcagacccctcttcatgggcatcctgtaagtgcctctttcctgaatttctaagcatttggagacttgggcttccacaaaaacactttaaagttgggagaacactcttctcagctttagcagagatcacagaggaacgaggattccattatccctgctctgcttactaaatgcaggataaagaccgttttgctgagggagaaattatattatttttgcattctcttttcctgaagtgctgactttctggcccttgttgtacatggaaagtgcagtggcgtggagcatcttatataatggagggtagcaaaatatatacctcataaaaagtggatgcctgtgtttagatctctgcacccacggtactgagcatctggatagaaggcagcttaagatagctcagagttcatcttccttcagtgtttccttattactcgaaataatctagattttgtagcactatttaaccatgcctgatcaaaagtaggctcctttagaaacctagttgggtcccctttgaaaagctgtctgtagctcttgtaccctcaaaccacagctgttgaagtagatttggtcttacacctgcgataaaagccagcaaattacctaatcacaagggatttgagtttctttatgccagtgtatctaggaccctctccctgcacacgcgcttctgtccatttgcccaaccttttgttcattctttgatgtgcaattttttcgaatagtctctatcaattgtactgtgggtgacagtcaagggaacacttaattctgggtagatgcatgtggcttttgtcagcaccaagcctgggcctcatgctttcaagtgcctgcacactgtagtgcattgcaaaatgaagtccttttcaaacgtgcactatagaataagttggaagttcaggcagagggagggaaataaataagaaaaaaagttagccagggcctagagacagagttcttttcatttctcatcacctccaacacccttggatcacacagcgcgatttttataacctgtcatccctaaaagctccgccatgccgtcttcattaatagccatctaacaccgtggccctgctttcaggtacaattcctccactcattaagtcagttgtccaaaacgaagaagggctgacgaccaacgaggggctcaagatgctggtgaccatctcctgtatcctggtgggggtcttgctgctgtttgtgctcctgctggttgtgcggaggaggcggcgggagcagaggctaaagaggctgcgaggtaggtccaggcccagctgtccacctacgcgtgtcccctgctgctctgcagccaatgggagagatgccagctggagaacaaacctcaaaagggagtgactcttccctctttaacccaggtccctccactgcctggttctctgacattccttcagcgagactgcagagcctcagggaagagcaataagaatgttcctatctcggtcagaaatcaggtgaaagccaacctgtcccctaaatcctagctgttggtatgcaaggaaaattaattttttaactctagtctcttaaattttcagtgggtccagcaaagccaccaattgtggctttctatgaaaagatctatcagatttgctctgggaatgagaattacttgactgactggaagtggaaattgagggcttaggatactggtgaagcattgtgaggcagaggacacatgccatcccaaattagaaacgggagctgaagcccagtgtaagagtttcactctaatgtagcaaaaacataatgaaggctggagaagccaggccagatgagctccattgtgaacagacaccatgattataatgtccagccccgtgtcgttctgtgatgaggctgttctcagcttctggccaagagcccttacttgcccttgctctgcaatgtgaggacagggagttatttcaaatatgaaactgtgcagacgtgttcccaggtcctttgccctttaccagtgagggtgtttaactaagccactttttcggtaacgtgtattacaagggattttcattttaatatcagtgcagtgtgggatactgctatgcagcatcctatgtgtgtttcaaagttatgttcaaagtacaaatctggaagcactctctcctcaaaacatatcccaaactttactgatacatttagaaaacgttgacctcttctgtaaatacttaatttgaccataatccacttagagcagagaacatggtaatattttcacctgtcttcacttatccaaagcaccaaagcactgctttttatggaattctggtacatttcactatcaacttgcttttgctctgccaacaaattacaattctgaagtacattgtacttcatctgtacaattaagaatctgtccatgtaaatctcctgcagcccaataattcaggtcagccatcagtctccttgaaatgttctttcgcaatcgtgcgaaccaattatcttttaattttgcagacattacttgagtgaatgctaggtgcttaatacacaaagatgagaagaaagagctttctgaactctaggtttaaggtaggaggtaggcccataagcagctaccagtgaaagacaaaacatgtcatgaatacagaaatagggcttcaaagaaagaccgcatcagtgaaaaagaaggacggattaatcccaagtggagaggaaaagggaggctacttcagtgctaagtaaaacagaactacaagcgtataatacagcccattatggtgagaagttccatataatgtggaccatgttgaattccattcagttcatcactaaaacacaaaaaggatgttttcataacccttgttcacagtggcctggactttaggagaattattatgagataccaagggtgtctttccttgttaccattagacaactatgtctaactacttgcatttagaaggctgcacattgtctgtatgatgtttctaaaaaccaatagtaaatatttcttattaatgattttgatttaatcacaagagttaagcatctaggtaatgcttctcatcggtctacaccctcgccaaattcactttttcttcttttccctgactcctattgctctccatccttctcagctactattttatttttcctactcaccttcgaacttgagcaccccagctgtgcatttcctctcgctgagagcacctccagttaaaggtgctgtgggctcttactgagtgaggcctttgggttgaaatgatgacccatgcaccctgtatttgtattcttagtagttccttgtaatttaattgttgctgtacaagggctatctccagaaaacatcctggggctggcatttttattgttggcctccctgcttccagacactagtgttttgcagttggttttggtaaagacagcagtctatcacctcagagaacatggcctttcattctccggaaatagttttgatttctatgttctggggaaaaggtaaatccaacacaaaggtttcagtaggaagaaagtaagtgctgagggaaagagggagtattactaagagatgttaaggagcaaaggatttcagaaaagtagcttgccatggcacaaaggtatctgcagttcggcattttgtacatggctaataaagggttctctcaaatcaagaatctgacaggagaggccgggtgcggtggctcacacctgtaatcctagcactttgggaggccaaggtgggcggatcacgaggtcaggagatcgagaccatcctggctaacatggtgaaaccccgtctctactaaaaatacaaaaaaaattagccgggggtggtggcgggcgcctgtagtcccaactacttgggaggctgaggcaggagaatcgcttgaacctgggaggcggagcttgcagtgagccgagatcccgccactgcactccagcctgggtgacagagcgagactctgtctcaaaaaaaaaaaaaagaatctgacaggagggcggtcaggatgccaaggattgggtacccaatttcacaccacttctgaatggcaagttttaatgtagacacactgcaataaattcagtttgacaaaccactgtagattatctaccaggtgcaagatggaacctttttttaaactagtggtaacatttgctggttgaccatttctatttgatcacaagagtttagccaggtcctagagagagaagagatttctaagactcagaactataaaggtgacattgtagtggcagtgggtcaaggcttgcaaggggcagactcatctccgtaactgtgcaaagcactgccataaaaggacagcgccagaggtgagggtggtaaaggggaatcgatgaaaggtcaggcattgccccagaaagacgtttgtttcttagccctgcagggccctgaaatgttcattaatgatacaaagtattttcaactcactcatggagggaaattgcagctgcagagtttaaaggaataggtgcctgtctattaaatatccggagtgcattagtcgaatcacccaataacaagcgaacccacataaggtacagactctgtgcctctgggagaataagttcaaatatatttacagactctacagacagaatattttgattgtcaaaattaaggacaacatttctagtaacatgtcagtgttgcgtgagcaaccatctatcaggatcaaaaatggaaataaggagatttgaattatagaaaaatattatagggatccccagtggatgtttttagagtgattaggtgggatcaattttatatggttgaaattgatcacatttttcaattgctagaaacagcaaaaatgtttataagctgagtatgttttactgtatagacaagtaacctagttagatgaatataatataatgttattttatgtaaaattttagaaagaaagaaagaaaatgggactctagcagtgtcgtcaacctatattctctcttcctgagtactttactaattttagagcatggcgacctcctaaactctaaattgcctgcaagtgcccacatttttttttaaatctataaccttatccaggagttcaggagccgcattttgcttttaatgatgccctggtttttcttgaacttctagatcctttgaagtgcaaggttatagagtgagtcactggttgggcctgagatcccagcagccctaaccttataaaatgtgatcccgtgtcaagtaatcaactccaatatttctaaaagcctcctcctttggtacgcatttacgcaagaaggcacaagcttctgttggcaccagttagtgtgggtcaacctgcaggacttcaaataagctaaagataaaaatcagtgagtgatgtcacatttgaccatgcttttgtggcagagtgtcttgcttctcttgaatggaaatgtgtttattattttaaacatgctttgaaatggattgttacaaaactgatcaattccggaagagactgttcccagagaggatctgggttcatggtgctatgcaggcagattaaggggtaggttatgagaaatcattgttattttctgagtactaacaggacatttatctgctctgcaaatgagcccaaagctcccctcatttggaaaaccaaaaggtaacttgaactttactaacctaaagcaggaatgtgcatccaggaacccagtgacactcagacttgagatagactcaaagtttcaatagatgccccagcactaatgcataaagccaccctgaatgtgggaagcccacattgttaatgcatgagtagcacacatgcaccctagagctttcgttaccaagtgtggctaagatggcattagaagcctgtactctgaaactctttagttctgtgctttgtgttttctttctttctttctctttgtctttctttctctttctttttcttttcttttcttttcttttccttccttccttgcttttctctccttccctccctccttccctccctccctccttccctaccttccttctttccttctatccttccttccttctctctccttccctccctccctccctccttcactccctccctccctccctccttccctaccttccttccttcctttccccttctctctccttttttctctctctccctctctctttctcttcctctctctttctttctgtcttggtttcttaatgaaattattctcttaaaacatcaaacttgttatggcaaactgaatagaaaaggctctctgcatctgacagcgggaagcaaaagagcatgggggtgagggggagtcgagggctaccagtggaggggagccagggagtgggtagtcaggaggggattgtgggtctcagccgggccctggagctctgccttgcctgggtgtcctattttgtctgtgtctgtgcatgcagttttttcagattaccagtatatatggccttctttttttaatatatgtctgccacagttttcaaattagctttcatctgagcattgtgatgattggaagtcctatttgggatcttataaaaacataaatgcaggtttatagcccttgcaaaaatagctactttatgagactatttcaattccacagaaaggcagggactgttgagggagaggctgcaaataaaaccttttgatggatggtaatataaggtcaaaatctgccaccctcagaaagtttttttgtggatatctgcaagtgactgcccagtagaagtattaacctaagcgtcttccattttacgtaactagaacttcagatatgaaaatgtagccatgtggctataaacaagatttctcttttttaaagaagcatttgagtgtgcaaaatgtgaggcagttcagcctctcaagctttgcacagctgcagtgcctggggccatggtgggcactctcccacgccatgctgtgtcatgctctgccttgctgatgtgcaccttcatgccaggcacaaccccaggatgcaagctgtggtctataaacagaacacaggaactgggcaagaccaagctgggagcctcctcatccaaccagaggtgccatttcccaaaactcgatctaaccatgtactaatccacaggctactaatgcttcccattgtttcgctcctctttcttctccatagtacttcactatacaccatcctgccttagtctctcaatagccatgcaaaatggttgagtatgaactgcccattatgatgccccaattttctttcttttctttttcttttttttttttttctgagacagagttttgctctttttgcccaggctggagtgcaatggtatgatctcagctcaccacaacctccacctcctgggttcaagcgactctcctgcctcagcctcccaagtagctgggattgtgggcatgcaccaccatgcccggctaattttgtatttttagtagagacggggtttctccaagttggtcaggctggtctcgaactcacaacctcaggtgatccgcctgcctcagcctcccaaagtgctgggattataggcatgagccactgcgtccagccatcataccccattttctgacgtgaaaactgaaggccagctatagaattatccagaatcacatatgagtccaggcagagctagaagagagttcagatcaatctccctaccctactcctcttgccatgaaacttctgcaggattttgaatattcaagtaagaaacaggttgtctcatcaatattaagtaagctctaaaggtttatcaattatacctggaattagaagatgtattaacacagtatcaatagctactatataattttatgtttgcccatcaaaaatacttggtctattgattttgtatttcgatattcactacccttcagccttcccctaattatattttaaatatgtatatattatatacagagagaggcacatatacatattccttctagcttgcatatcttcatcctactgtctctctgattcttttctccactgaatacttgagagtattctgtcctcagctacactacctctcaattactcccaaattcccacagtccccttccactcgccacccaaatgtaactgttctcctgaagacagatgaccagttattctctgatctccaaattatcctttcagccatcattttttagccctctttgcagcattcagagtgttagcaaatgttgtcttttgaaattccttccttccacattttaatatcactagattatcctggtatcatttctccatcatttcccagcccaacagataagggaggagcccagagccaaggatggaagtgtgggagtagcaagcggctttagaaaagatgtcgcgaagtctgaatctcaggctgatctgaaatgtgtgggaaaaaatgtgacaggcaatgcaagggctgtttagctgtgtttgggcaagaagaacaaggctgtgaacaatgttctcatattaacagatggcaggtagacaggagagctgctcagcatctgctttgcttgatgtgtaccaggagaaatgctatttgaatcagaaaacgtggaccaggaattataaaaagaaggaaggaaggaagggagggagggagggagggagggagggagggaatgaggggagggagggaatgaggggaggggaggggaggggaagggagaaactcaggatgcttatgaaaataatcagcaccctgatagtttaaaaggatttattttttttcaaaacatactctgtattagccattatgtggaggtggagatgttgctttttgcagacaatgtttacaaagaactattacacaagttccaaagcgtaagcagcctaatgcagacagaataaatgctgtgctgtttcactgaaaggaaagatctccaccacttaaaaaattagggaagctgtcatggggttccagtcccatgattctgaaggataacattttagggttctgaacaaaatttttccagacataaccccaagatctttctggataacctttgaacaatcaaatgtaaattagaggtgttagaaaatgattatgcagatggtccctgacttactatggttcaacttaggagtttttgactttgcaatggtgcaaaaatgatatgcattcagtagaaactgtattttgaattttgatctttgtctgggttagtgatatgtgatccattatttttacatgagatactcaacaccttattataaaataagctctgtgttagatagttttgcccaactgtagggtagggtaaatgttctgagcacgttgaagataggctaggctaagccctgatgtttggtaggtcaggcatattaaatgcatttttgacttaattatattttcaattgatgatgggttcatcaggaggtaatcgtaagtcaaagagcatctagaccctggacccattttcaacaacaatagattaattctggacattatagactgaaataagttagttgaggttatagaaaggatgttttgtgagcaatcagggaagggaagggaccaccaggggcccagacaaactccatttgcattttgacagggctgattaataagggtacaccaggatgtagctgaaagcatgggcaggctaatccaatcttggaggccacatacatcctggtggggaagctaatgtattagagggacaaatccacattttaagagattttgaaaggctggaagcaagaagatacagtttaataggaataattgtgaagtcttctatagaagttgtaaaaaaaaattcatttgcaacacgtataatgagcattgtgctctccctagtgtgctagaagatcaagaattaccagcgtctttctcagcctcattttatagagaaataaaaaaatcacaaacctttcaaagaagagattcccaagtagggaattacctagaaatcattccgtatgaggagtggctgagaaaattagagaatgtaacccagaaaagagaaagctgaggccaagcaagggaaatgcagctacatggaaatatctgaacagctggcaaatgacttcaggttaaaattacatcaaggaatttctgcacaagaaaaggaagatgtctctcacaattaaatgtgtcctcaggaaatctttgtgcagcttcactatggatcagggacaggactgtgcccaaaagggccaagagaaagacaacccgaaaacaggtgggcacagtatgagctgggaagggctgtctgagatataaggcagaggtccagggaagcggagggaaccgaagcttcacccctgcctactgggcatgggagggtacacggagcaagttgcgtctgcatggggcggtggggacgatggagggctttgcactagcaaagtcttgggctctctgcagaaagtggcaagtgcaggaaactcagagagaggttggaggttacaagtgagcggcagcggagccggatgacagcttggaccagcacggaaggtgggttctctgtgctaatgagggctgttgcagtgaggtccctttgaaggtttcaaagcacaggtatcactcagtaagatggattccagtcttcacccttcctgcagtgtgggtatcagtgttgggcacaccagcagtaaggatgctgactaataagtgagattaggactgagaagagaaaaaacaaaggttcccctggggacatgctggctgggagagacctgcagacctggaaggcaggagagtactgggaggagaggaaggacactaggtgtgcagcaggagcaccgaccccaaccgtggagtggcagtggccccagctctggattcatgcagacagagaatatgtgtacgtctgtgtaagacattgtgaaagggattccaacattcattaggtggccaatctgaaaagtctttattgctcttaagattctgtgattccgggactttaaatttttttcttggcttgtctcagactctcttctcaccctcaacaaaagtgtgtcccagatgagattttgccatcttctttttgcactctctctatggggatatgaaaaacacccagaccctcatctcagccctggcatctttccaaatttgattccaaatttgcctctgaacagcctcacctaatgtcccccgatattgaaactagacaagtctctcccaagattgctgcttccatgttgttctagtccattcctgtcactcatgttactacatccagctctgcatatcccaaatcttgcccttttcctggactccctgcaactcctccttgtcccactgtacacctggtaggactctgattcgtacagatttcctctatcttcacattataatgttacccacataaccctggctctcttctctaatgcccagagcctctcacttggactaaggactaagaagctttcaacaagtcccaggcccccacctccacattcagagcattctggattgcctggtggatgctagttcacagcacccacacccatccaccacccacctctgccctcctttttcctctctccctttggcccaggtagaagctttcaggtcagtaatacaaagtcacatctccttagctctttaatgtctagactgtgcaccagaccaccatcctggcaacttctctgtccagtcaaattgacctagactttacttctcaaatgggctcataattccgatgcatgtgaattctctgcatggagcacactgcccattcatggcaaagctccccacgtcccatgctcctttaaggtggggtcagtgttaggtttagggaagggttgacccaaacggtcaacccttggcatctagacctgtgaaagaccttagccttggggaggatgcctgcacgtggcagccaagagaggtctgctgtcggcatggcagtcattgtggggagctcttttctccctgctggactccgcaattccttagtacattgccatgaacagctcataggagagagctgtgatgactgaccgagaataggaaaaggagagattattgtggcgggcagaatgaggaaagcagttgatcagaagacaattgaggctgagaactctttcaagtgtgaactgaagtgggatgtttactccttgaatttgtttccccctttttagagtattgtaccagccactgcttggtagttcattggagctaattaagtccaggcttctggcattatatgtatgtgtatatatatgtgtgtgtgtgtatgtatatatatatacatacatgaagtatatataagcacatatatatatatatatactttgtaagtgttaaatcattcagggaaagaggaaattcattatatttactgtgtctttgcagataaatataaagacatgaactgggaaatccaatcctattttgatttcttttctttgctgtgtgggtggagtatatgggccctgtttcattgcccaggctgaacccatctgtgcacaaaaccaggccccatcttggggttaccattgggactggccaacttaacgaactaagcttggctcatggcaaggacagcctctacgtggtcattctgtgactgtccacgtctttcagaaatagcatgctgcccactgtgcagaaactgactacgtttaattgtcagcccccaaaggcatgagatggaaatgctcccacatacgtatactttcactgcagagctggtcacactgtcagctgagtccatttccggaaagttctgttcattgaacagtatacttagcatcaagactttttagagagcaatgaaataaaaacaaaaagaaggtttttgtgctctaagtaaggaaacattcatttttgccaggaccaaatgtgtaaaaagaataaattatattttaaaggaaacgggaatttcaaaataacaccaccaaaaaaagggattttttttttcctacacttttagtcaggattccttctgtcaagagtggtaacccggtcttggtaaacaatgtgctcagagaaaaaaaaaataaagtttttttaatttctgaattcaaaataaacatctaagtttccaggaacatttatatttcatttatacgattctttggtcaacccaaggaactcagagctctgtaataatgccacttacttctgatattttgataacaaaaagcatgggtttgttcaacgtaaatgatataccctcaaaatgttaattttctgactactgaaaataaaattggatttcctagaagtgactgtaggttggaataaaacatttagtagatgtctgagaatgttataatcataggatagttatgttgatatttttgtaattaataaaatacattttaaaagtcccatttagaagaaataaggactccatgaaactctaggtcattagtagtgagctgggtatatgattgtgtttcaaaatgactgttctgatctgactgtagagtatttgtcataaatgcctaagtgaatgttaatgagttatttaccatgtactaatgttaactttctttccccagatgcaaagagtttagctgaaatgctcatgaggtaagaacaagacctagcaccccagatatcatgtttgaaagaacaatttccaacttgccttgatgatttctatttttttaataatggcagtctgaaattgataatgtcttttctttttagaaaaaactgtaatttcctatacattccaaaatatccatgtaatgcctagctgaaggtgtagatgaaaatgatgtatttgtagacatgccacaggtagttgtcttgttggctggacacaaccaatagaaggcttcccattagcctgggaacagaagcacgtaaagaggaagtagctttagttttgccttcatctaaatttactactggtgaggtcaagccttctttctaacagaataatccaagttaaaagaaaagcacaaaaggaatgtgctatgccccatgctcttcaaaggctctgtgtctccatcagcaccctccaccagggcacccttcagctcctcttaccactgtctgttcactgtctattctggtcctggaagtcacagccttcatagttcatcctcgtgttaggagtagccagcacagtagttgccccattcataaccgtggaggggatgaatgaagagtggttattgaatgagtacgagaatgttcacaactgtggaagacagaaatgcatccttcacagctttcctttcacacgtccacaggcttgtgattggcaaagctgtgacaagtgtgttactttcacgtccccaaactctattttccacccagtccccctcttcaaatgttcagttttcttgtgctgtccaacctttttactctgtaaatactagaacactctgatatgaagcatttacacgtatggattaattgcctgatgtgttacctcaccctgatatttgcattttaggcctttcatattgcaatgattacatgaaaagtgaaaaaggaaaatcagagtctaggaaataagtagggaaaatgtcaaggactccgatagtgaactcaacattgccagtttaggatgatttacgtgggagagagagggtggatctaggacctcttcccactcccatcaccaacacatttgcctgtgacttcctcctccatctatacatataaaattagtactctttgttatttaaaaacttcccatgttccatatcactaatatctttgaagaccgaaggcagtagtagaatgccattggcacacagattccatcctacagacattttgtttggccataccgtatttcaaaacaatgtgaatcgtaggtaaaacaatgatatgaaggataagtcttttcctttttcttttttttttttttttgggacagagttttgctcttgtcgcccaggctggagtgcaatggtgcggtcttggctcactgcaacctccgcctcagaggttcaagcgattttcctgcctcagcctcccgaggagccacgattacaggcgcccgccaccatgcctggctgatttttgtatttttagtagagacagagtttcaccatgttggccaggctggtctcgaactcctgacctgaggcaattctcccgcctcagcctcccaaaatgctgggattacaggcatgagccaccacggaaggataactctaaaatacatttgttgtgactgatctgatgaatgttggtgccatctgccaagattaggaagatagaggcaggctatggacttttgatttttttggaaggtaggttgggaggaggtattgatgggaatgaaaagacctatttgggtcatgttgaatttgggattatttttaaggcatccagaggaaatgtcagatagacaactggtagcagaaatctggagctcagaggaaaagcaaagatgcaaattccctgtacagtatctccttcataaggggtacttcatcacatttccaggagaagattacagaaattgcatgagatgccttcagcccgtgctttttgtttatgtgacatttatgggtcacagggaacacatccaaacacacatgcacttgtgttaagcagatctgataaaacaaagatctgcttaacacaaagaagctggaaaacaaagaagtcagagtcacatgacttgtaataactgatctacctaataaaagaaattgtcaaaggtagactttaaaaatatgaattagttgatgacatttaaaatgaggagatttcacataaaatttggctttctgatttctcttgaaaatgccctggccatactagcaccgcggaggtgataatggtgcctggaggtaggcacagtagccctttagaatggcgtgagtttgctcaccaccgcagcccccacccctaccccaccccgggcctgcttcaccagtccgtacactgagcagggctccttcagccctccagagagcttctcctcccctcaactgtgctctgcacaacctaccctggccccctcccctatctactcccaaactgtaaatcatgcctttgtccagaggctgtgaaactgcgggctatattttctgacatgttcaacatttgctcaattaggatgatttgctttttctcttctcctcatattctagagtacattcctactccttctccctagcctctgagaaagacattagcaagcatcctctatgaatagggcagttgctgtggttgcaagaccatctgttgataagaggaggaattaattatggtcttcctattgccagttaccagcatgaattaggaagagtaaagccagtaatcacaaccacttatgatagttacagtggttttccttcaaatggtcaaagtgattgaaaaggaagagaattttcaagctcctccaataggtggatttgtatgggattaatttagaagtaaaagcaaagcttttacccatgaaaggttggttcaatctaagttcggcaggtgaatgggccaagcaaacaaaaacctcattacctaactggtcaatttagaatcaaccatatttggacatggcccagggggtccagacaaatcatgtccactggcagagagaaagatactgaacagctacccctggtctgtgttgctgttttctctagaagtcaaaggaactggcagcctggtacagtgagaatacgaaccacaagtctgtgctctaggccccatgtggccataagctggttttcagatcttagtaggtcattttaccgctttgttttccttacctaaaaaataaaaataaaataaaaaattcaacattgtttctagctttatcactccacattctgtgttctaaatggatgtaacatttatttttcaaccattttctaccaagaagtatctgcgtatttcagggagattagctgagggccaggccaggaaggcagattggacagcagaacatacccactcagtctaggtccccagggattcctggcctggcagcatcacccattgctgggcttcatgctcctagatatccacctgtttcacccatgcacatcaccccagagaagagagactgcatccctcacacccagacagaaagattgtccttttatatttttatgtaagatttttatttttaaaaaacagccttctaagaggtgtttgctccaaagagataactgtatactgtagagagctaacatataatgtttaaggtccaggaatcagcattagcgagtgagttgggtgtaagcagaaaaaggttcaaattagttcagcttttttgatgttcatatttttgtgcacataataaaaaatctctaccctagtgttataatgagctatgctcctaatagtccaatagtcattgtacatttaaggaatgttctgtgtcatatttgggaggatgatggactattaagactttgaagagtggcagtggctgcaaataattgattggctaagctgggaaattctctgccctatgaaaccgtctctgctctcctcttcttctcattttattcaaacaaccagatggcaaataaatggatggttgaagattatagctcaataataactaatatgtttagcatgatcctatgccatgcaaaaaagatgcaatttttgcttccacagtgaaaacatttggactgtttttccaggttgcaaatgaggtttgttcaaatcacttttttaaggtttgctgccattctaatgaccaattgttatcatttttgaggttaacagaacacagagtgataaatataaatgtaacaatagattgtcaaaagtgacagcaaatattaagtaatgaaataacttagttggaatccagtgaccttttagaatgagaaggatattattgcctcaaaacaaagtcttggggacatctcactcagctcacgttgtgccctcaaaataaatcaatgtgaggatttacttcacagatatttattgagcacctactttggccatatactgttctaagttctagggagacacaggaaacagagcaggtgaagaaaaccctggtggagcatattttccagtgagagaggcagataatggataagataaatcaactaagtatatgctagagagtaataagtgccaagcagacaaaattaaacagagaatggggacaggacacagaagacgtccccatcgcagggccagcctggctccactggaaagatgatggcatctgagtccagccttgcaacaagggagccagtatgtgggttttgggggtagcaggggaagtgtgttctaaacaacgggaacagccaagtgcaaagagaaagaagaactgtgagtccggccaggcgcagtggctcacacctgtaatcccagcactttgggaggctgaggcgggtggatcacgaggtcaggagattgagaccattctggctaacagggcgaaacccggtctctactaaaaatacaaaaaagccagacatggtggtgggcacctgtagtcccagctactcgggaggctgaggaaggagaatggtgtgaacctgggaggcggagcttgcagtgagctgagatcgcgccactgcactccagcctgggcaacagagcaagagtccatctcaaaaaaaaaaaaaaaaaaaagactgcagtgaactgtgattgcatcactgcactccagcctgggcgacagagcaagaccctgtctctaaaaacaattagcttctgaatctcaaggcttgttgggccgttttcttatagtcttctgaggaggaagaatttacctccagccttggttgtcctggttcgcagagttgaatcaagttctaaatcttggtgccagccagtcgcagtggttcacagccattatttagcctgcttcctgtggcaatctggtagcagaccccttattgttgtttaagtatagcctgcacttggtgttcatcgctatttaatagagcagccgctgactgcctcataactattcatgaagagcagaaggaactagctcacacttctatttttggtgcaaggacaagctcaagtccctagtgaggtttctaaacagatctttgggatattcacagaggagtagttccccatatgtttttgtggaaatatagcttgtctaagcatgccgtaaatgcagccccccaagtaaccaaaatgctcctccttttatttgattatttgaattttttcattactctctttttaacaaaatcaacgaatgacaagttagttaagtcagtaatttgaaagagcttggagaccatgtgaaaagtcaggacaaaacgtttgaatttgggctctgcataattagcatgatgtaggtacatagcccagttccttatctgcagagcaagcaatctggttcaagatcaagtcctaagtaggaatgttgcacctttcagaagttgtctttttcatgggataatttgcttttactcaaacgaggagtatacatggatctcatcaggcaaacatctaagggggtacttgagtgaccttcactttgggataattaaagttctgtccaccacttggtttaagagtggatgagtcctcattaacaaggaaggatcggtggaggcacagccctgggactcggggtaaatggctcggttagaggggaaagcatttaaaatgtagcattgagtattcctattttggtctccactaaaagtaacacagaggtaaaccattattgagttaactaggctccagaaatctttctcaaaaccagtgttaacaacaattgagctggattgatggatgccatagattatgccattgattggattatccaagtgactgctgcttcttagaggatgcttcagtaaatactatttgaacatctagtaaagtcttattattctgtaaagactgaacaaccacccttctaatgtggattgctaattaaagtctttattgacttttttagatttttgtgcaacgtggagttttttttttaactgcaggctataactgaatccgattctaccatgcagttttactacttattttcatttacttttagagaacagctcactctaagagtaatcttctgatacacaaattttgagattaaattatgatagtaattgctttttttccattctaaaatgtactatcagttaggaaaactaacgtcagggaagctaacaaggtttgtgatttgcttctagaacaaaaataaaatgacaccagatataaatacaaatccattagtaaaactcccatccgacaaacagctggtgcacgtgctttttccctcaccatctttggaatatctggtgctttattcctcaccatcactggaatatctcacatctgacaaatgaaaatgctgttggtttttaattgcttttcatttgtttcatttagcatttacacaagaaatgagaactttctaaagattctattggtagatatagagccaatctctattgacaatttgtattttctgaaactctccagccagctgaaatttaatattaataaataaataacatttgaatgaaggaaacgttttcatagtatgtacgttttctgttcccctcctcacaaggtatttgtatatttagacaataaactaagttggtatacaggtgcatgttggtagaatgttaacactgaactggatttgttaatgcattaccccattttattcccagtaagaatacccggacttcagatacgttaagcaagcaacagcagaccctgcgaatgcacatcgacatacccagggctcagcttttgattgaagagagagacacgatggagaccattggtaagctgccctatttgccactttacacaaagtggctgccacagccatgccttctcaatccaaaccccaggatgtgggaaatattagacaggagagcgtcttgaaggctacgtgagtaccaaagctagaaggtagagaattgttcttgtgaagaagaatcagtaccagcaaatgtgcagaaaatttgacttatatataccaccatatatgccaatatgccagtcagttccaggcatttgggacagaaatccctcagctctgatccatttgggatctttccaggggaggctacggatgccactccaaggaataaacatctgtaatcgactacacatcaatccagaaggcctgcactctaaagccccaggttgaaaatccactccgtgcccccctcatcaactctgataatgcaagccttcattaaataaaacttttaaactgtacttaacacttaaacaaacacatgtctttgtacagggtatcttcccccacaccagtgccccagaaacatcctgcagctgtttccccagcagcactttgggaaaaacaccagggccctagttttagggtttcagaacagccaccctgaggttttctggcttgttcaaccagaacccaggtatcttcactcttcccagcctctttccacctgaagtccattaccccacactgcctgcctcgattattctatttattccggagtgaaataccttatatttcctttccagtaataatgagaagaatagctaacatgtattgagaattctgtaaatgtcacatagtttttataagcacttcgtgtgcattacttaatttaacctttcaaccaacatatgaaagaagtcttgcttttgtaaccaagatgtagagaggtctgtgtagctttccaaggtcacagagacaggcgcagaaccaggttccccacctggccacactcaccgccatgctgtctgtctccaatgacagctagcacagcagcaggccacctgcttccacaccaacaggctgcttccaagaaaccctcaaccagaagttatccaagcttttgagtgcccatggaaacaccctgaggcaggctccgaggctgcctcttttcaaacctggctatgtttgttttggaaggtgtttgctggcatgagtcccaggacaaccctttcttgtggtctggataaactgcctgactctcagcacatagcccagctgcctcctgccgggaaggcagtggtaagagaccaggtgggcagaacacctgctccatcaaccatcacccttctgctgccccacccaccactggagacatcttgacctaatggctcctaaattctaaggcctgggttctcctggctgaagtcacatttggtccaggcatagcagcacttaaagattggtcaagtgcaaagtggctcttgatcagctaacttcagtgaaacacttcagttaaaccatgtatgtgaggtggcactacctgccctaaagtacacaagattttattagcttgcttgtatcaggacaagggataagctactatgttttgcttttgattatctttttttgggaaaggggaaggtatacctggaatctcttttgtttcacccagtagattgggcattaaaactgaaaatttcctttgaaaaaatttcaaaaattagaatgtaattcctttgaccatataattttataagccatttatatgcattatttaatttaacccttccagccaacataggaaaagtttcttttgtaactgagacacagagaggttacatagtttgtggaggtcaccatggttatataacacgttacaatatttgctaaatgcgtctcactagacaataatcctacatatggctatgaaaatagatagctaggcagatgccatgagtggtctatggccttccaagagctggtcactggggggcttaacaccagaggaagcctgccagtcatttccatttgtaaatatgaccgttcgccagagatccatcccagtccatgcaggatcatgtatcagcaagagcccttgacctccttgtgatgcctgacaatgggtcgatggcattttctaattactgggaagtggaactgtggtgcttcaaaatgctctgggctctgaccacaagaatccaatattacagtgacattaatttccagctagaatgaatggttaacctcatgatcagacaggcgcccaaaattttccatgaaaagtgtgtaacctagccccgcagatcatctggtgtgatctaaaagggcctgcctgctagaaactgtgacatatcccatcattaatgaaaaacaaatgtagacacggagcctctcgtgctgggtccagttgtaggaagctgtctctgtggaagagccaccctctttgaggagtcgagtgaccgccacggggccggacctccaagccaagcccaggcgcctgctgtggtgccaacctcaccgcaccatgcgctgggatactcacagacatcttggcagcctttcctctatttctctgccaggaaattttattctaactttgagaggctttcctttcctgccagagactgagtaattggattttgtaaggttcattctgttcagagccttttttgggcacagaagtcgagctgtgttgtttacgactttcgcatccctgttgcagtgtcagggcagggctgcagtatggtccctgctgactgataaactcttagcaacagcatcctgggctgcaatctttgaaaatttatgaaaaatctgtatatcctagccaaagtctcccttggagtaaaaaagctttttaaaaagtatgaaacatatcacaaggtagtaatgagaatcctggcccaccaaataatgacccagctcaaacagcagctcctgctccaagcactaagatgcccagaacccatccaaacccaggctcctgcctcgctcaccttcaagtgcccacggcagtaggacttgggaagtctgacaagtgaatcatgtaggagaagtcagttaatggatgttctagagtgcttaaagcttacaggaggtgggaagaaaaggaacataccttgagtcctttaaaatagagcaatcaataagctctgaagactggcatgttttcttctcttttatttcccctccaaacattagccaagttcagaatgagagcaaacctcagtagagagaactgtagtggcgattttctagtcctgcaaacagagcttcccagcagccaaagggacctgtcttcattgacagcctcatcactggtgagggggctggcatcgcagatgatgtctcagagaagcttttgacaaacacataaatccagagttcaaatcaatgttagcttaatgaaaagccaagcccaaagagaaaagagagctccttctctgcatagtcatggttcttcttagctcattgctcccaaagccaacccctaggaagaagcttctattcctagcactctagagtaatgctaattcagtgcttgaattttcaatcatttttgtcactttagatggggctattattgtggttgtcattaacaataacacaagtgcctcaggagagaaaaggccagggagtggttggaagggagataaacgtgtttggctttctgtgttcctgccatcctgtagatgatcgctccacggttctgttgacggatgctgactttggagaggcagctaagcagaagtccctgacggtcactcacacggtccattaccaatcggtgtctcaggccactgggcccttagtggatgtttcagacgctcggccgggaacgagtgagtggtcaacaatgcttaaaatgtgtgggtgttaacaatgctgaaaacatagtaatgttctttctctctcaaatgaaaatgtgtggcttttcatacctatgcctgagaaacaaatgggtataataacatccctaattgggataatgagctgttattgatggatcttggctattattatgtcagttgaattactgttagtattggttactataaaaagtgctagaaatttcaggtacatgtatttatttttttaatttaagcaacacagaaaaggaaaaaagtaatctactttagtgtgtatctgctgtatgccagtattgggatagaacgatgatgtcatgcacgttatctttgcaacaatcctgtaagatacctactcgtgaagcaggtatcatagcctctattctgcagatgagaaaactgcagcctcagataaattatgcaaacagtataaagttgcacacataagtagtaaaaccaagattcagaaacagacccatctatccccaaagcttatgcttttgcccctgaacacactgtttgagaaaaattataattctagttaatgtgaagattatgttggattttgttattaatatttgcatccataatatatggaaattaattactgcaatgaaggtgaatcccctaatatgtatctagagcttattaattagatactcttatttcttcataattggaatcgttcctaaatctctttaaagactgagaaattgatgtcctgattattatcattttggaaactttgacgtctagctttcaaatctctaatcaatttctttgcaaaaatttacattcttagaatagtgtgttattattagaaaaataactattataatgttaaaagctattcttcataaatcctagcttgggaagcatttgcgaaatgcagtgagctttatgaagtaaacccattgcctacgaaataacattgtaatatacagaaaacagtttcagcaggcattgaaattcatttaaaaaatgttttcaagaatattctacattctaaagaagtcttttacctcttccttttgtctaatcttcttaccgcctttcttctttgatcacattaatacattctgaagacataaacgggatatgagtgggaattagctttgcaaaggggtgtgtgccagagccttgctcttaaaaaatgatccagactgggcgcagtggctcaatcccagcactttgggaggccgaggcggtcggatcacgaggtcaggagattgagaccatcctggctaacatggtgaaacctcgtctctactaaaaataagaaaaattagccggcctggtggcgggcacctgtagtcccagctactcagaaggccgaggcaggagaatggcgtgaacctgggaggcagagcttgcagtgagctgagatcacgccactgcactccagcctggacgacagagcgagactctgtctccaaaaaaaaaaaagattcaagggctttgacatctcttcagccgttggcttctcccttgtgaactgcctggtgtggcttgctgctactccaagacactgctccaatgggtttaagagccacttttttgctgctaaatcagaaaaagttacagatattgaaaggattagatttttagagtgatgcagcattggcttcagcattctgttggaaacggtggcagaagagcaggcaaaagagacaacagagcagatgccctgggtctcgttctccacctttacatgcatcagaatcacctggtgcctatttaaatatcaattccaggcctccacccagagattctggcctaggaatccgcatggtaacagacaccctgggtgattctgatgctggccgtttggaccccacattgagaaacactgccccaagggttagaaatgtttcctgcatgtaacgcagcagggcaggacccctccggcacatcagttcttcctgccaggtaaaaagcaacatgcatttctgcttccctgtcaatggtcagctagcagccgagaatgcataaagctagtcataaatagttaagacaggagaagcagcagcccaaaacaaaagcactggcaaccttccagcttcatggtcagccccagaataatggggaagttgatttgttggcatgtaaaatatcaacagagacatgaaccggagtcacagcagatactgtaaaccagtggtcagcgagtgccaggcaggacgcacatgggagggacgtgtgtgtatctcatggctataaagttggaagcagggctgggaatgttaatgcgttcattcagcactcaaaagtatttattcaggtttcactttacgtatatggctcagtgctgtatgatggagatacaccatgagtaagatgcaaaaagacattcatttcatcctagtcagggggcagacattagacatggaactaaagtagttttcatttctcagtaagtcctagacagaaagagaatgaagccatggtgagtcagcgggcgtgtggagcagtgggaggggctctcttgggtccaagtcattcaggaggacttccagtgaggggaagacatgaaacaagatcagagtcacagcaggagcagagggggcagcagggaaaagctcccaaggttccccgcatgatgaggatggaagtggcactggagcacagtgaaaggcagggaaaaggtgagacagagaaacagctgtcctcatctttcagggtcccctaagccagtgcctggcaggtgcatttcattctgagagtgctgagatgctgtccctggggcttagcctgatgatcacagggaaacactatagcttatagaacaatgtttctgtcctttgtgctgaatttcactaaatgatgtttaccaacatcaagcaaatctactcaaatgcatgcatcagtctctggttcccccctcactctccaaattgagcgtattaatttagcatttgcagaaccctctgtattagtaaaagatctgctggatcatttttttcattaaatcttcctcaaaaaccacagtgtgagggactgacaacactccgtgttttatttagagttagaaatggtaggtgactggccccacagtgggttcaagagtctgaaacccatgaactttctgaagcacagtcccccactagcttcttgcaccagagcttctcacctctgcccaggtgtttatacctctgtgaattccatggagccggttcttctcaccacagtttggcatacttgcagagaatcatttgtattctctattttctcagctagagaacacatcgtgattctattttgtatgttaggactgtgttgtcattgcaagaattctttatttttaagaaaagcatctaaaacatgttgcttgcataccagaatgactgcattgtagaagttatgtttctaggcattttattagtttgccagagggttgcaacagattcttatgaggatggaagaaatcataacaatttgctatttatctctgtcagtagtgaaaacacatcccttggctggttctgctgcactgattacttctctgtctttcctgtggattataatacactggaaaactaggactctatccatgtcctcatccccataccagccacagtgtctgacacaggcatgtagtggataaataccaatcagccatcaagttctgagatcagaacaatgggaatggaaaagaaaagacattgagtcatgtttgctgcataggaatcatgggcacggccagctgtgcctgtgccatgtgcccggagcacttgggcacattaatctcatttaaacttcaggacagctcttaacgtgggtgatgacatcacctagtctcagagactaggggattagtcaggtctgtctgacaaggtcacttggccagcgacacagccagggagtagtgaatatgaacttccagcccaggcagcctaattccaaagctctcactctcagtcattctacatggcctttaggtagagatactacatatagaatatgtagagactaaagaatagacttcacatgtacgcacattcaatgacaagagcttacaacatggacttgaatctttattgctgagactttgaaagaaaaaatgccctctgttacccaggatgggactagcagtggccctgagggaaatacctggggtgggtgaggtgcatccagtggtccaggatgtaataagtgctagataaatattttttagttacatgagggagtgttcagatctcccagtttcatcctctctctgagacaactagtaaattcgttatgtaaagctggacctccacaactgcaagatatggaaaccaatggcacagatgaaagcagattaataccatgatcacagtacgcatgacatgttctgtaacctattatattatctacaaaatcctctctcatcccaaactcaggataattaaaataatctgattcaatgggcagaagcttaattagggttcaaaccccatgttgaaaggccatgagctatttatatcctgtgccctccaactcatgggctgctgagcaggcatgaagcttaatcaccgagttttatttatattagaatgctgggagcctaacaaaatactttccatgaaggagcagtaaatcccagcgtttatttgctcagtagatgagctagtaagttacacaaaaaaggcttcctgtggaatccaagtaaaaattatattttagctgctatcttagtcattatcatacagcagagttcagttcaggtacaaaacaatggctccaaaaaccaaattattaaaaaataaatgtgtcaaataccccagtattctacatactgaggcaattttgaccctaggatgcctgcctagcgcagtacagaactgagggctgtggtttaaggaaactaatatcatgacctaaattttcaacattatcaggccaccagtaaaactgtcctcatctagaaaaaaagagattatgaacaaaattaacttgaaaagagaccaggctttgaatcaaggctgcatgtgcgactttcccatggaattttccaagtagggtgatctcaatgaggaaaggggctatgacagtgaagatctttgccccaccattggagagtgagctcaagcagaagaaatgagggtcaaggtttgggggattggaggaaatgactgtatccttgaagtgggactagcaaactataccccccaaccaccccccaacttccatgccagaagtaaacctgctcagaatgagctacaacagttgtagttgcaagaaacttaaagaagaataaaaatgagaattttcaaaacttatgtaagggactgggtaattttctggaaaagactcattagcatttaaataacaagcttcacttatttaagctccacttatcaagtcgatagtgcctggaagacatttagcctcttccccatcataatgtttttctgtctttttgagggcctctttcctagcatttcggtgaagaaacccaattatcattcatacctggttgtgtagagctccaacataactcatttacattctcatcaaggacaaaaaaaatctaatgaagtcttccgtggaattgtgcaagtaagggatgaaatgtgtcttaaaatcaatgccccagagaatatttaccaagattgagtattctgatgatttaggagatcttaaaatctatctctttggctgccatcttaacgcacctctccagcgacacagaatgatagattagattcaaagtcgaattaactagaaacttgcagtgaggaaatctcccgtttaaaaacaaagtcattgcaccttcccagtgttagcctttcacattccaacatggaattataagcaagccaaggtcatgtagacacagcactaggaaacttagacactcaggatttggccatatgtggtcaagtaacaggcgttatctgaactgaaaaggcagaaggtttgggttatagttttatcacgtaacagctatgtcacttctctctgagcttccattgccttcataaagtgaccctaggtctatgaattccttcagaaaactctgtatgtcagggattattgtaggctctatgaatggatccacagagggataccattgcccctgccctggagacactgccaggctcatgaaagcacataaataaatcggtgcaataacattacaggccggccctgtcagttttgctcctttgaaacttcgtgagagcccaacagtgaatacagtctgctgggtttagaagtggccagaccatactgaaatataactgtatcaaactgctctttgagaagcagagaattcaaaggtagaaaagacccatctaggaccttaagctgtctccaggctggagccccagaaaaatcattccaggtaactgaacctctctcattttccacagaattccagaagaggcgatgttgtagcccattctggtacctgacagtctctgctggtggaacatccttcttcttacctcaccaaagggttgagctaagaactccgtccaccccatagacttgctgcctttggttccagatttagagaaaatgaaacccatctggcaccagcttaaccctttgttctccatattaaataacccaagttgtctctgttaaagttaggacaattctattgaagagatgtgctatcataggcaaggccttaaggagagttgggacataaaaatatggtccctctgctttaggagctttcaacttaatgaataaaacagtcatcattaaaacaatgagtagtaatatgagaaacaaaaatacaggcaacatctgtattaatttcctagagctgttttaacgtagtaccaccaaatgggtggcttcacagcacagaaatgtatttgcttgcagctgtagcactccagtctccacctgcatcatcccatggccctctcccctcctgtgtctgtgtcctcttcttaaaaggacaccagtcacagtggattaagggccaaccctattccaatatgaccttgtcttagctaatttcatctgtgatgaccttatttccaaaccagatcacacattctgaggtcctgggggttaggacatgaacatgtcttttggggggacgtgattcacgcataacaacacctaaggatgtagaaaggaggtcatgttagaacacactgggctgagcttccttgttttacagaatatgacgatgcccaggaagtttaaatgatgtgcatcgggtcataacattattttttgtactatcatccatttaattgcagttgcaaacatcgtaaccaaagtacctctctcaagtcattctctagcacagtaattggtttcattttctttataatcttcatcactgtttgaaattttcttgttttgtcctgtaattgttgtcagtctcccctcattccatttctagcttttaatgttagaagggtcataacattattaaaggccaagagcaagactcaaatatgtaacttctgaatccaagtagggtgttcttttccctgcagggctgattaaacacgtaagtatcagatgaaggtttcaagccataaaggaaagggaaagtatcctctgcacaggagaagtcaaggaagttttcctggagggcgtgggcgagtcggcagtgctgggtgggtggcactgacctctacgcttgctctcagctgaccacactcctgcagacaaaggcagacatgattcttggctcttcacagatcccaccaccaggaggaatgccaaggctgggcccacagcgagaaaccgctatgccagccagtggaccctcaaccgaccccaccccaccatctcagcacacaccctcaccacagactggaggctgccaacacccagggctgcaggatcagtagacaaagagagcgacagttacagcgtcagcccctcgcaagacacaggtaggccctgacgctgcctcctccgtccctggggaccagcacggcccccgcaccttgagcttcatgggctccttggggaggggagagagggcttcctccctcttacttatgttcttttgaaggtcactttcaaattgttacgcggtttatctaacagttactaatacaactgcacagcctttactccacacagggcaaaacagagccaaactgcatctattctgcaggtgtcctgaatcttagacccaagcttatttctccatttagttcctaccccactgggagaaatagagacatttttaaattttcacccccgtgattgcagtaattgctgattacactctgagggcgtctgacccattaccatctccaagattaagacacagcacttgaagttacatgatgaggtcatagcaccctctatagggaacacaggctgatccgtttgacaattaaacaggggttggttataaggtaagtcatccagtctatgccatcaaccaccaagttttcacttcagagagaagacaggccctaagaatagcaccgggttgcccaccaccccctcttaaattttgaaaagaaattacatctgaatctaatagctgtaggaaattttaatactcatttttcttttgttcttgatgatatacttcaaaaacagtgttccagaggaggatcatcgccatgtgaatttatttttaaggctgtgatttctcttagaagagtctcagagttccacacagaggagaccctaaaactttttagtgcatttgaaacgcagacatctccctgaccaagatggcgtggcccagctcaaaggcatgtgggcaccagtttttgtcctgatggttttctagtccccataaagggtaatcacaacagaagacgcatcccaggggtcgggggccattctggcttgtggccaatttccgtgcaacatgacatctttatttctaaatatcatcacatcttccttcctgagctgaggccccagaagctgaactgcagctcaaatcattcatgccaattaaagagtctctagggcatagatccatttgcaggttggagcagagagggggctgctgcctggctcctactgttttcactaaaagcaggattttttttaaagggaaggcgttatttatttatggaaatgtcccaagctgggacatctgactacagcaatttggttgcaacaaagcttcccttaaccggatctgctgagacttgtgaagctggcctcagagtgcctaaggcaggagcctccgccaaggagccagaactcctaccaggtcccaccatgatctggaagaaaacagccccaagccaggaagggccatgccgttggttcagacttctgatggtgagtcgtccgtcttgtttttctctttcctggtgtagatcgagcaagaagcagcatggtctccacagaaagtgcctcctccacttacgaagaactggccagggcctacgaacacgccaagatggaagagcaactgaggcacgccaagttcaccatcacggagtgcttcatatcagacacgtcatcggagcagttgacggcagggacaaatgagtacacggacagtctgacctccagcaccccttccgaatcgggaatctgcaggttcactgcatctccccccaaacctcaggatggaggaagagtaatgaatatggcagttccaaaggcacatcggccaggtaggtgagcaaggccacctgggggccgtcgcttagggaagtgcaccttcctggtcctccctcatctgctgtgaaagcccttctcagtgttcagaccaaatgggtgctctgtttatggatggctgcataacaaaccatcccaaagttcactggattaaaactacagcagtcacttactttgtttatgaatctgaaatttgggcgggacctagtgagggtaccatgctgcagaggctctcctggggctggggatccacttccaaagtggctcaccgacctggctgtgttctccctgtgctggcctctccacaaggtgctttagcttcctcacagcatggtggctgggttctagcagcaaatggtccaagatacagtctgtggaaatagccagtttccttaggttgggcctggaaactgacacagctatcatttctgtcatattctattgggcaagcagtcacagagcccaagaaaccctgattccagagaaagaggcccccactgcttgatgagaagactgtcaaaaatgtgagggctgtattttaaaactgccacactgagggcttctgaaaggggagaggtcttactatatagtcagtgtttgggacttggcctcactgaattacacaaggtgatggtaactggctaacattaagtcagccagcagtttggtcttcaacttgaacacctgtgaatcgtccgggttgtgaaagctgcaaattttgaggtcagcaaggcatggcagataatagaatgcagaggctagagaacagggtcaaaggagcgaggcggacatgggccatttcagggttcactactgtctaaaagaaaagactctagcaaggccctgccaactgatcgcaagtggaaatggggtcttagtatggacttgtgttttaagagaagccggaaaacttggttttatatggaaattcacagctttttagtgttggcttggatatttgtaaaccattgtacagggcaaataaaacccatctttaggtggaatccaacctatggcagccaagtgtagttctcatctgaagaaccactttttctttttcaccctgaaatagttgcctgtagactttccttcacagactgatctatccaatcttattgaatccagttttgtttctcattttacccattttctacaccactgttctagttccatttcaaaaagtatcttcacttttgaattactacaattcccttgggttttatgggacaaggcctagctgaaatgagctttataaatgcataaaaatatataaaataagaatagtttatccagcaaataatcttccataccagctcaagattcatgccagcatccaataaagaatgatggcttcctttattttcattctgtctacctccttaggggaaaagacaagctgttatttgtgggtgtttttatttcaactattttttttttttcgtgttgttggcatttatttgcaaggcaaatggagaaaaatgcaggataaatgccatgactttctgcagctcttcagcctgaaggtgaggaggactggagagaagaccataagcctgtgggcatgttgtataggcgttctcagcttcagttcctgcatctgtaaaatgggaatggcgttggtgactgtgtactgggcttctgttagatgcacatagcattatacaggtgaaggggtcagcagaggaggcactcagccatgttagccattgtttctggcactgggttgctagaatccccactgtgactccagctgtactgctgacctcctcttccttcttgcttttatttttctccagtgaccactgaagtcctagcaggtacccacctcaattgtgtgtcacccagttaagtactttatgtttccacctgagatagcatgccgtcattttccctttgtgtgtgatttagggcacagaatgagcttctaggttaaaagactgtcctatttgtgcaggcctttacataattacagggttgaagcttgtttttgatggcacgctgctcatattgttggattgtttcttaaaaatttgacctttgctcatgatattgtgacctggacccattagagcaatggaagatcatagctaagttactattgtcttcatagactattcagagtaaaatgattttataaatataggtttgaataatctcttaaatcaatgcaagttcaaatgtccacaaactttgttttgtctaccctagatgactgcattattactgaacatctgatatgctttagaaaatatttcagcctttggaaacctttccgtcgctcctttataattcaactaaattcaacattgggcacaaaatacaaggttgcagtttactattctgctaactagagcttgtgatacaattagcagctcctagagctgtgcttttacatcacattctttccctatatgccctcttcacgctagatgatattcgtcatgtctgtttctgtttatagtcttccaaatctctcaatttcttcctcctcaactttagagcttcttttctgatggtcctttttttctctttccctttttattttttctgtcttcagtacaaatagttatgatccccagactttgaaattctctgcaaattgccatcaagttacatgaatttggccagactgtggcttcagaaaaataggaaatatgtcttagttatcttcatacttccttctcaaggtctagcagatacctgatagccaagtagttatcatgcaagaattatttttaaatgaattaatagtattgaatactcaatactacatacttaaaactctctctctatacataaatatatatatctcctgtgtgtgtttataatatacacatatatggccagactgtgtctggcacattagtagatgcttcataaaccttactgtatgaatgaatatatcatgcttgtgacaacaaaaccaactggttaaattggttaaaatatttcaattaatagaaattatagtcaaataaatacaaaaggacatttaaatctactccaactttcagtagctttaatcaaagtgacttattttccattctttttttttttgatttttatttcatctgcataatttaatcagtttttccttcacatattcaaaaacctacattggtatttttttctgacacgtttcccctgttagactttagtttttcttagttcatattctttttcttttcttttctttattattatactttaagtttcagggtacatgtgcatattgtgcaggttagttacatatgtatacatgtgccattctggtgcgctgcacccactaactggtcatctagcattaggtatatctcccagtgctatccctcccccctccccccaccccactacagtccccagagtgtgatgttccccttcctgtgtccatgtgatctcattgttcaattcccacctatgagtgagaatatgcggcgtttggttttttgttcttgcgatagtttactgagaatgatgatttccaatttcatccatgtccctacaaaggacatgaactcatcatttttaatggctgcatagtgttccatggtgtatatgtgccacattttcttaatccagtctatcattgttggacatttgggttggttccaagtctttgctattgtgaataatgccacaataaacatatgtgtgcatgtgtctttatagcagcatgatttatagtcctttgggtatatacccagtaatgggatggctgggtcaaatggtatttctagttctagatccctgaggaatcgccacactgacttccacaatggttgaactagtttacagtcccaccaacagtgtaaaagtgttcctatttctccacatcctctccagcacctgttgtttcctgactttttaatgattgccattctaactggtgtgagatggtatctcattgtggttttgatttgcatttctctgatggccagtgatggtgagcattttttcatgtgtttttggctgcataaatgtcttcttttgagaagtgtctgttcatgtccttcacccacttttcgatggggttgtttgtttttatcttgtaaatttgtttgagttcattgtagattctggatattagccctttgtcagatgagtaggttgcgaaaattttctcccattttgtaggttgcctgttcactctgatggtagtttcttttgctgtgcagaaactctttagtttaattagatcccatttgtcaattttggcttttgttgcctttgcttttggtgttttagacatgaagtccttacccatgcttatgtcctgaatggtaatgcctaggttttcttctagggtttttatggttttaggtctaacgtttaagtctttaatccatcttgaattgatttttgtataaggtgtaaggaagggatccagtttcagctttctacatatggctagccagttttcccagcaccatttattaaatagggaatcctttccccattgcttgtttttctcaggttggtcaaagatcagatagttgtagatatgcagcattatttctgagggctctgttctgttccattgttctatatctgtgttttggtaccagtaccatgctgttttggttactgtagccttgtagtatagtttgaagtcaggtagtgtgatgcctccagcttttttcttttggcttaggattgccttggcaatgcgggctcttttttggttccatatgaactttaaagtagtttcttccaattctgtgaagaaaggcattggtagcttgatggggatggcattgaatctgtaaattaccttgggcagtatggccattttcacgatattaattcttcctacccatgagcatagaatgttcttccatttgtttgtatcctcttttatttcgttgagcagtggtttgtagttctccttgaagaggtccttcacatcccttgtaagttggattcctaggtattttattctctttgaagcaattgtgaatgggagttcactcatgatttggctctctgtttgtctgttattggtgtataagaatgcttgtgacttttgtacattgattttgtatcctgagactttgctgaagttgcttatcagcttaaggagattttgggctgagacaatggggttttctagatatacaatcatgtcatctgcaaacagggacaatttgacttcctcttttcctacttgaataccctttatttccttctcctgcctaattgccctggccagaacttccaacactatgttgaataggagtggtgagagagggcatccctgtcttgtgccagttttcaagggaatgcttccagtttttgcccattcagtatgatattggctgtgggtttgtcatagatagctcttattattttgaaatacgtcccatcaatacctaatttattaagagtttttagcatgaagggttgttgaattttgtcaaaggccctttctgcatctatgcagataatcatgtggtttttgtctttggctctgtttatatgctggattacatttattgatatgtgtatattgaaccagccttgcatcccagggatgaagcccacttgatcatggtggataagctttttgatgtgctgctggattcggtctgccagtattttattgagggtttttgcatcaatgttcatcaaggatattggtctaaaattctcttttttggttgtgtctctgcctggctttggtatcagaatgatgctggcctcataaaatgagttagggaggattccctctttttctattgattggaatagtttcagaaggaatggtaccagttccttcttgtacctctggtagaattcggctgtgaatccatctggtcctggactctttttggttggtaagctattgattattgccacaatttcagatcctgttattggtctattcagagattcaacttcttcctggtttagtcttgggagagtgtatgtgtcgaggaatttatccatttcttctagattttctagtttatttgcgtagaggtgtttgtagtattctctgatggtagtttgtatttctgtgggattggtggtgatgtcccctttatcattttttattgcatctatttgattcttctctctttttctctttattagtcttgctagcagtctatctattttgttgatcctttcaaaaaaccagctcctggattcattaattttttgaagggttttttgtgtctctatttccttcagttctgctctgattttagttatttcttgccttctgctagcttttgaatgtgtttgctcttgcttttctagttcttttaattgtgatgttagggtgtcaattttggatctttcctgctttctcttgtgggcatttagtgctataaatttccctctatacactgctttgaatgcgtcccagagattctggtatgttgtgtctttgttctcgttggtttcaaagaacatctttatttctagcttcatttcgttatgtacccagtagtcattcaggagcaggttgttcagtttccatgtagttgagcggttttgagtgagattcttaatcctgagttctagtttgattgcactgtggtctgagagatagtttgttataatttctgttcttttacatttgctgaggagagctttacttccaagtatgtggtcaattttggaatacgtgtggtgtggtgctgaaaaaaatgtgtattctgttgatttggggtggagagttctgtagatgtctattaggtccacttggtgcagagctgagttcaattcctgggtatccttgttgactttctgtctcgttgatctgtctaatgttgacagtggggtgttaaagtctcccattattaatgtgtgggagtctaagtctctttgtaggtcactcaggacttgctttatgaatctgggtgctcctgtattgggtgcatatatatttaggatagttagctcttcttgttgaattgatccctttaccattatgtaatggccttctttgtctcttttgatctttgttggtttgaagtctgttttatctgagactaggattgcaacccctgcctttttttgttttccatttgcttggtagatcttcctccatccttttattttgagcctatgtgtgtctctgcacgtgagatgggtttcctgaatacagcacactgatgggtcttgactctttatccaatttgccagactgtgtcttttaattggagcatttagtccatttacatgtaaagttaatattgttatgtgtgtatttgatcctgtcattatgatgttagctggttattttgctcgttagttgatgcagtttcttcctagcctcgacagtctttacaatttggcatgtttttgcagtgactggtactggttgttcctttccatgtttagtgcttcctttaggagctcttttagggccggcctggtggtgacaaaatctctcagcatttgcttgtctgtaaagtattttatttctccttcacttatgaagcttagtttggctggatatgaaattctgggttgaaaattcttttctttaagaatgttgaatattggcccccactctcttctggcttgtagagtttctgctgagagatccactcttagtctgataggctttcctttgtgggtaacccaacctttctctctggctgcccttaacattttttccttcatttcaactttggtgaatctgacaattatgtgtcttggagttgctcttgtcaaggaatatctttgtggcattctctgtatttcctgaatctgaactttggcctgccttgctagattggggaagttctcctggataatatcctgcagagtgtttttcaacttggttccattctccccatcactttcaggtacaccaatcagacgtagatttggtcttttcacatagtcccatatttcttggaggctttgctcatttctttttattcttttttctctaaacttcccttcttgcttcatttcattcatttcatcttccatcactgataccctttcttccagttgatcgcatcggctcctgaggcttctgcattcttcacgtagttctcgagccttggttttcagctccatcagctcctttaagcacttctgtgtattagttattctagttatacattcttctaaatttttttcaaagttttcaacatctttgcctttggtttgaatgtcctcctgtagctcagagtaatttgatcgtctgaagccttcttctctcagcttgtcatagtcattctctgtccagctttgttccgttgctggtgaggaactgcattcctttggcagaggagaggcgctctgctttttagagtttccagtttttccccatctttgtggttttatctacttttggtctttgatgatggtgatgtacagatgggtttttggtgtggatgtcctttctgtttgttagttttccttctaacagacaggaccctcagctgcaggtctgttggagtaccctgccctgtgaggtgtcagtctgcccctgctggggggtgcctcccagttaggctgctcgggggtccggggtcagggacccacttgaggaggcagtctgcccttctcagatgtccagctgcgtactgggaggaccactgctctcttcaaagctgtcagacagggacatttgagtctgcagaggttactgctgtctttttgtttgtctgtgccctgcccctagaggtggagcctacagaggcaggcaggcaggcctccttgagctgtggtgggctccacccagttcgagcttcctggctgctttgtttatctaagcaagcctgggcaatggggggcccccctcccccagcctcactgccgccttgcagtttgatctcagactgctgtgctagcaatcagcaagactcagtgggtgtgggaccctccaagccaggtgcgggatatagtctcgtggtgcgccgtgttttaagctcgtcagaaaagcgcagtattcgggtgggagtgacccgattttccaggtgccgtccgtcacccctttctttgactaggaaagggaactccctgacccctgtgcttcccgagtgatgcaatgcctcgccctgcttcggctcgcgcatggtgtgcacacccactgacctgcgcccactgtctggcactccctagtgagatgaacccggtacctcagatggaaatgccgaaatcacccgtcttctgcgtcgctcaggctgggagctgtagacgggagctgttcctattcggccatcttggctcctcccccccaggcacaatactttctaaaggcaccttgaagcctaaaagagcccttcttatactctgaggtatctcaccactgaaactggttacatacatctgtattgggaattaatggataagggtggaacaaatgaaatgcatttctgggggccagatattccaaagcagtttggggtagccttcttcctcctcctctgcaatgctttgttagttggaggctgtaaacatgccgatgctttcccaaatttgtgggaatgaatgtgaatcacagtttttggggcttcaatctcctctgcggacacataaaaaggaactttcatcaatttctaacaaggtttgagatctatgcctggatagagctggatattgatgcaaaagtaagaagcaaaagatgatttccttgagttccagcaatttcaataaaaaacacagagaccagacttgcaacaacactatagtgtcaaagagctggttcccaaaggggagcatagagtccacccataccagagacagacgagatctaacactttttgagtttaatattaatgttgcagcatggtaatgaaaactagtaaaagaatctctcttggtaaatgaatcttcactcccaaacggcaagcaggaaaaaccctaaataaataatgtgagattgatatcagaggcccatgtgcagggactcgattacaattcttggcttgtactcaggggccctcatgcattttttaagagctcatcaatattgtgatccttctgcttgctggtgaactttaaaaactacaccgaggtataaaagtagggctttgactttgttgaggcttatgattcttctcaaataaagtagatctgaataaaagacggattggaaaatcttccctggcctttaggcaagcacagaacttagcagtggttttggagcacccactatggaacgatccatgagatccaaagatggatacagttcccacacaacagccacaaggaaccacacattggggaccacctgaagcagaaccctagctgggggcttggccttgttctgccatgaagctgacagagctgtttctacaacaatgtgcatcttgaatcatcccacagaaggagctgagttaggctggaaatgagagaattccagacagagggaaggtatatttgtggagttgtaggaggccagaaagttgaaggctggagactaggggcaaggttggaggctggagaccaggggtcaaggcaaggaagacaaggctgacccctcagacgctagtaagtctctactgtgagagcagcaggaagccatggaagggggttaaacagaggaaggttgactcttactggaaatgatggcttgtctcccatttctggtttgggatacaggatgccttaggccctggtgccagcagagtgtacaggaggccacattggaagacgatggtctttgctgtcttcttacctttctgtatgctccctgggccttcgtgtggctttagcttctcacaaggcctcactgggctgtgtatgtgtgtgcgtgtttgtgtgtgtaggtggtgactgaccatcttctatgagctgggctttgtattatttcttgaccttctcaagatttgcctgtctcatgtcttcagaacccattgcctgcagtctttgatacacactattctgataaatgaatgagactgtgaggagtgttaatttaagatattaacccttttatgtgttagggtaatacccagtgtctttttactcaggagatattcaatcagtagggattcaatacacgagtgtcgtatatttgtgttttaaccgggtctgtctgagatgcagtgaacgttcagttagcctgggcagccttctttcttgtcatctgtagagctggaatctgggagcttccttctggtcactcagcagggacaaagaggcctctacccccacatcactgttctctaaggtacatgcctcccccatcactttccacctctcgaggaactggcacagcccaggatttcgcaatgattagaactgaaccccaataagctacccaagaaaaacagtgagccttttaaggggctcagaagtcagacaagagaatcagaacacagggaatacatgttctggaacaagaggacacaaacaccagcttagcaactgcagcaagtacagtgaaccagccagaccaccggacaaggtcagaggtacaggggatggcctcttgaacacagtggcaggaggatggttgcagggtagtggctgcagaagaccccatgtacatacatgctaagcttttatttcaggcaaagggcttagagttctaagcttgagaacccctcagaacaggtcctactgtcactttctgagtctgagggagagttactaagaagacactgaaattctataagagcccttaagaagctaaaattgcaaatactcctcagagagacctggatttccagcagaaatcaggattagcacatgccaatatttaggtcgacatcgagtgggcgtgaacagcagtatgtggaggctttgttggatggccccagggttcttttaacctaaaattctatgggagtgtttgaagggtcgtagttcagagggaactcttgatccctgttgtgaacgccaagctcattcctatctcctggcctttatctttgctcagctctctggaccaccagaaggatctttgcagggctccttccatcccatcatttacgtctcattgcctgagaggcctttccgggccattctttccaaaatactcccctcccacgttttatccccttcctggatttgcttctccacccagcactcaccacagtcgggaacgatactatttgtttgtttacttgatcagtggggatctctgtgggtcttgtctatcaatcactgcatcctcagttcccaaaacaggaccagtcatttagtgtccactcaacacacgcatggcaaaaaaagacagaggagcagggaggctgagagggagggagcaagccttcctctagaagggtggaacgcagagcagtgcagtgagaatgtgtgtgtgcctgtgtgtatccatgcatgggagcatgtgcttatgtatccacgtacatgtgcatgtgtgtcaacatatatgtgtccatgcatgtgtacttgtgtgtgaatgtgtatgtgtgcacgcatgtgtgtgcgcaagcacacgtgtaggcatcaaagagacttgcatttgaaaggagacccttagtataatatttatgataaacatttcaaaactgagttttagtgatgtgcagaacagaggaggaagatgcaagccccgaggcttggcaccccagctgcctgagccaagtcctcaggcagtgagggagatataggtaagtgaagctgggggtgggggttatttagctctgaagattggactgctggtgtcttgttttgatttcagagccaacatgacagatacccagacttcagagagggaaaacagcatggtcaaaatgacaactgagaatacggtggccagccttggtcagaatagtgctgacctgtgcagaggtaggctctttcttcaggtaagggctcctggcctctctgcatgccttggggcccgcctcctactctccaccctcacaccctcaggagagagtgatgcaagatgaatggatcctaaaattaaaatccagtaactctttcgaattactggcaatttagtgaattaacaagttggcaccaggcagtggccttttcccactaaaaaaaaaaaaaacaacctcaaatgcattccccaaggaaggggctgaaactcataaccttgtgtctggggcccagagggcatgagcacagagatccaaaggggctgatgctttccctaccactagtggggcaggctgtgttagggtgcatgtctgaaacttgaaactgaattaagtagcttcatgtaatggcttctcttgacggcacaggataaacatcataagaagaagaagcagtaatccaagaaggtttgcaactggctcaaaatgctacctgaaaccaagaattggaagccaccttgacccagaggaaaaaaaattgttaaactttgcagctatttctcaaaagaatagagaattttgttttctgtttgtagagatgggaatagtcatcccttatggaagaagacaataatttgctgcatttttaggacttgtaattgtacaggcaaattcaaaattcaggtagcattaaaattacagctagataatgctgcctgctttgtggatagctatcctcatttcaagggagagcacccctttatctgttgaagagatgtctttttgatttgctaagggcaagaatggaaaataagtgcgaataggaacagctccggtctgcagctcccagcgtgagcgacgcagaagacgggtgatctcggcatttccatctgaggtaccgggttcatctcactagggagtgccagacagtgggtgcgcacactgtgcgtgagccgaagcagagcgaggcattgcctcactcgggaagcacaaagggtcagggagttccctttcctagtcaaagaaaggggtgacggacggcacctggaaaatcgggtcactcccacccgaatactgtgcttttctgacgggcttaaaacatggcgcaccacgagattatatcccgcacctggcttggagggtcctacgcccatggagtctcgctgattgctagcagagcagtctgagatcaaactgcaaggtggcagccaggctgggggaggggggcccgccattgcccaggcttgcttaggtaaacaaagcagcctggaagctcgaactgggtggagcccaccacagctcaaggaggcctgcctgcctgcctctgtaggctgcacagacaaacaaaaagacagcagtaacctctgcagactcaaatgtccctgtctgacagctttgaagagagcagtggtcctcccagtacgcagctggacatctgagaagggcagactgcctcctcaagtgggtccctgaccccggacccccgagcagcctaactgggaggcaccccccagcaggggcagactgacacctcacagggcagggtactccaacagacctgcagctgagggtcctgtctgttagaaggaaaactaacaaacagaaaggacatccacaccaaaaacccatctgtacatcaccatcatcaaagaccaaaagtagataaaaccacaaagatggggaaaaactggaaactctaaaaagcagagcgcctctcctctgccaaaggaatgcagttcctcaccagcaacggaacaaagctggacagagaatgactatgacaagctgagagaagaaggcttcagacgatcaaattactctgagctacaggaggacattcaaaccaaaggcaaagatgttgaaaactttgaaaaaaatttagaagaatgtataactagaataactaatacacagaagtgcttaaaggagctgatggagctgaaaaccaaggctcgagaactacgtgaagaatgcagaagcctcaggagccgatgcgatcaactggaagaaagggtatcagtgatggaagatgaaatgaatgaaatgaagcaagaagggaagtttagagaaaaaagaataaaaagaaatgagcaaagcctccaagaaatatgggactatgtgaaaagaccaaatctacgtctgattggtgtacctgaaagtgatggggagaatggaaccaagttgaaaaacactctgcaggatattatccaggagaacttccccaatctagcaaggcaggccaaagttcagattcaggaaatacagagaatgccacaaagatattccttgacaagagcaactccaagacacataattgtcagattcaccaaagttgaaatgaaggaaaaaatgttaagggcagccagagagaaaggtcgggttaccctcaaagggaagcccatcagactaacagtggatctctcggcagaaaccctacaagccagaagagagtgggggccaatattcaacattcttaaagaaaagaattttcaacccagaatttcatatccagccaaactaagcttcataagtgaaggagaaataaaatactttacagacaagcaaatgctgagagattttgtcactaccaggcctgccctaaaagagctcctgaaggaagcactaaacatggaaaggaacaaccggtaccagccactgcaaaatcatgccaaaatgtagagaccatcaagactaggaagaaactgcatcaactaacgagcaaaataaccagctaacatcataatgacaggatcaaatacacacataacaatattaactttacatgtaaatggactaaatgctccaattaaaagacacagactggcaaattggataaagaaagagtcaagacccatcagtgtgctgtattcaggagacccatctcacgtgcagagacacacataggctcaaaataaaaggatggaggaagatctaccaagcaaatggaaaacaaaaaaaggcaggggttgcaatcctagtctcggataaaacagactttaagccaacaaagatcaaaagagacaaagaaggccattacataatggtaaagggatcaattcaacaagaagagctaactatcctaaatatatatgcacccaatacaggagcacccagattcataaagcaagtcctgagtgacctacaaagagacttagactcccacacattaataatgggagactttaacaccccactgtcaacattagacagatcaacgagacagaaagtcaacaaggatacccaggaattgaactcagctctgcatcaagtggacctaatagacatctacagaactctccaccccaaatcaacagaatacacatttttttcagcaccacaccacacctattccaaaattgaccacatacttggaagtaaagctctcctcagcaaatgtaaaagaacagaaattataacaaactgtctctcagaccacaggtcaatcaaactagatctcaggattaagaatctcactcaaaatcgctcaactacatggaaactgaacaacctgctcctgaatgactactgggtacataacgaaatgaaaccagaaataaagatgttctttgaaaccaacgagaacaaagacacaacataccagaatctctgggacgcattcaaagcagtgtgtacagggaaatttatagcactaaatgcccacaagagaaagcaggaaagatccaaaattgacaccctaacatcacaattaaaagaactagaaaagcaagagcaaacacattcaaaagctagcagaaggcaagaaataactaaaatcagagtagaaccgaagcaaatagagacacaaaaaacccttcaaaaaattaatgaatccaggagctggttttttgaaaggatcaacaaaatagatagactgctagcaagactaataaagagaaaaagagagaagaatcaaatagatgcaataaaaaatgataaaggggacatcaccaccaatcccacagaaatacaaactaccatcagagagtactacaaacacctctacgcaaataaactagaaaatctagaagaaatggataaattcctcgacacatacactctcccaagactaaaccaggaagaagttgaatctctgaatagaccaataacaggatctgaaattgtggcaacaatcaatagcttaccaaccaaaaagagtccaggaccagatggattcacagccgaattctaccagaggtacaaggaggaactggtaccattccttctgaaactattccaatcaatagaaaaagagggaatcctccctaactcattttatgaggccagcatcattctgataccaaagccaggcagagacacaaccaaaaaagataattttagaccaatatccttgatgaacattgatgcaaaaatcctcaataaaatactggcagaccgaatccagcagcacatcaaaaagcttatccaccatgatcaagtgggcttcatccctgggatgcaaggctggttcaatatacacaaatcaataaatgtaatccagcatataaacagagccaaagacaaaaaccacatgattatctcaatagatgcagaaaaggcctttgacaaaattcaacaacccttcatgctaaaaactctcaataagttaggtattgatgggacgtatctcaaaataataagagctatctatgacaaacccacagccaatatcatactgaatgggcaaaaactggaagcattccctttgaaaactggcacaagacagggatgccctctctcaccactcctattcaacatagtgttggaagttctggccagggcaattaggcaggagaaggaaatgaagggtattcaattaggaaaagaggaagtcaaattgtccctgtttgcagatgacatgattgtgtatctagaaaaccccactgtctcagcccaaaatctccttaagctgataagcaacttcagcaaagtctcaggatacaaaatcaatgtacaaaagtcacaagcattcttatacaccaataacagacaaacagagagccaaatcatgagtgaactcccattcacaattgcttcaaagagaataaaatacctaggaatccaacttacaagggatgtgaaggacctcttcaaggagaactacaaaccactgctcaacgaaataaaagaggatacaaacaaatggaagaacattctatgctcatgggtaggaagaatcaatatcgtgaaaatggccatactgcccaaggtaatttacagattcagtgccatccccatcaaggtaccaatgcctttcttcacagaattggaagaaactactttaaagttcatatggaaccaaaaaagagcccgcattgccaaggcaatcctaagccaaaagaaaaaagctggaggcatcacactacctgacttcaaactatactacaaggctacagtaaccaaaacagcatggtactggtaccaaaacacagatatagatcaatggaacagaacagagccctcagaaataatgccgcatatctacaactatctgatctttgaccaacctgagaaaaaacaagcaatggggaaaggattccctatttaataaatggtgctgggaaaactggctagccatatgtagaaagctgaaactggatcccttccttacaccttatacaaaaatcaattcaagatggattaaagacttaaacgttagacctaaaaccataaaaaccctagaagaaaacctaggcattaccattcaggacataggcatgggcaaggacttcatgtctaaaacaccaaaagcaaaggcaacaaaagccaaaattgacaaatgggatctaattaaactaaagagtttctgcacagcaaaagaaactaccatcagagtgaacaggcaacctacaaaatgggagaaaattttcgcaacctactcatctgacaaagggctaatatccagaatctacaatgaactcaaacaaatttacaagataaaaacaaacaaccccatcgaaaagtgggtgaaggacatgaacagacacttctcaaaagaagacatttatgcagccaaaaacacatgaaaaaatgctcaccatcactggccatcagagaaatgcaaatcaaaaccacaatgagataccatctcacaccagttagaatggcaatcattaaaaagtcaggaaacaacaggtgctggagaggatgtggagaaataggaacacttttacactgttggtgggactgtaaactagttcaaccattgtggaagtcagtgtggcgattcctcagggacctagaactagaaataccatttgacccagccatcccattactgggtatatacccaaaggaatataaatcatgctgctataaagacatatgcacacgtatgtttattgcggcattattcacaatagcaaagacttggaaccaacccaaatgtccaacaatgattggattaagaaaatgtggcacatatacaccatggaacactatgcagccataaaaaatgatgagttcatgtcctttgtagggacatggatgaaattggaaatcatcattctcagtaaactatcgcaagaacaaaaaaccaaacaccacatattctcactcataggtgggaattgaacaatgagatcacatggacacaggaaggggaacatcacactctggggactgtagtggggtggggggaggggagagggatagcactgggagatatacctaatgctagatgactagttaatgggtgcagcacaccagcatggcacatgtatacatatgtaactaacctgcacaatatgcacatgtaccctaaaacttaaaataataaaagaaaaaaagaaaagaaaatactgctaaaatacatccaactcaatacttttggtaaatattacttgttgctaataaaaagtttagatataagaaaaaaaaaaagaatgtattgtgcctcattcatttgtctaaaggcaagagcaccaaggctcaaaagggtcacaaaactacctggaggcagaagcagaggcagagacaggatttcaacaccaagccctgcactctgtaactactgctctttccactggaatcagctcctgcctcagcgggtgccaatggagaaagacctgggggttttgccttctgattacagttccattggaccatctcttattttcttccatgaagaactgaggtcgtaactccttgtggactagtattctgaggctgaggggtacaactgcttatcctggttgaattcaatgctttataagtagaattaaagtgaaataaggaacacttggccttatgaattctgatcatctaaaacagagtttctcaacagcagcaccgttagtatttgaagccagatcattcttcgtggcaggggctattctgagcattggatgatgttgagcagcacccctggcctctgaccaataggtatcaatagtgtcaccctcccctgtgttatgacaatcaaaatgtctccagactttgctacatgtcccctggggacaaagccaccctcagtggagagcctctgatctagtgttcagatattttcccctagtgtggtgcctgggagatagcaagaaccatagcaagaaccattgtttgatgatggattaatggaatgcacatccattttctgaattgcttcattcttgttatttcagtattgattttgccatccttcttccaagaactgaaatacattcaaaccttgcgtgtgtctgaatagattgagaaaattcaggaagttttgctttcctaggtttcagctaaaaggaggcaggtttagttcagcagttttcccacagtcaggccaaccatggttctaatgcaccgttagtggagggggacaagctctgagtgtgaatctgctgatggatgtggggcctgcagaaggaatctgtacatttcaggaccagaggcaaggaggagcttgtgatactagtatgcaaagtggttagagaaagagagagaaatcaatgctgacctatttaatcagaacttttggagacattaatggcactgaaggtccccagagggcagcaacagaaggatgagaaatgaagcatgatgtcaaataagaaagcaaaatgctgcaataatgggtaaagcgtctcatcctcaaggcggaagtcaaagcagctgcctgggttccctccagaaaggcagtgatgggtgcagcctgtgatctgcactgggttttggtgaggctgatgagaaaagaatgagaaatgggtgccccagtgatggatgggccagtggtccttgtatggtgcacacatctttaaagctccacaagggccgttcaaagtgggtggtacacatttattctcatagtactcacctttctggtgccctcttcctccactgctccttaccactgtcccagatggttaccatgttccccttttcccttctctatttgtgactctgtctctaatttttatctgtctaccgacctgcgtagctatgtttcttttctttttttttttttttttttttgagacggagtctcgctctatcgcccaggttagagtgctacgtttctttctttctgcctccctgtgtgtgtttccatctctctgatccctctctctctctctgtgtgtctcttcccctctctctcatccatcctccctcacacccccccagccttattcatctcagcctcccctgaccctggtatgttcctgcatctcagtccctgaactcagtttcccagagcccttctctgtgcttggccatctccaccttctccatccctcaccctcacttagggtctctgacaggaagggcattggcctcagggcagagcacagtgggttcatggtgtgcaaatccaccattacagcccaaagaagtcagcagggggaccctgtcccaaaggcccaggcaggactctgtgagcctttgtattcatgctgggcctgggctggagacactaactgggtttagctcactgggaaggaaccggcagtgcgggcaggtaggtgagcagggcagaaggagggcatggaagtgagttcaagctcagttcctcctgccgtcagaccatgagctggatcctcctaccagcgctagtcctttccttctccatgcctcaacttcccctttcagtatgctgctcttccagttagattttccctcccatatctctctcctctctctctctctctcacacacacacacacaccacacttttcttgatgtgtatgccctgcttgctgtcttattgcactcagctacctctttgtccctcccctgcttcatgtttttaccccttttctatgcctttgatttcgtggatagaagttttagcacaagggaaacaaaacaaggaaaagaaggaaggaaggaaggaagttagttttcatgttgcctgagactgggtaatttataaagaagagatttaatggactcacagttccatgtggctggggaagcctcacaatcatggcggaaggtgacaggcacatcttatatggtggcaggcaagagaaaaatgagagccaagtgaatggggcaaccccttataaagccatcagaccttgtgagactcatccactaccatgagaacagtatgggggaaaccactgccatgattcaattacttcccactgggtccctcctacaacacatgggaattatgggagctacaattcaagaagagatttgggtggggacacagccaaactatattagaaggaaaataaaggaaagaatggagggaatgagagaaagagataaagagacaggaggaagggaaagaaggagggagaaggggaaggggggaaatgtggagaaaggttgagggaagcaaagcagaggaagtgaagtgacaccatagagtatggaaatcattgccaaaaatataagtgaattttgtcatagctggttttactgaaacaagtactaagactgggcatttgcctttgccagtgtttatggcaatgatagatttacacacagggatgccgagggcatttgcacccagtggaggtgagtacccatgacatggtgacccaatatggtgaccctggagttcaaagcacaaaggatccttggacttcttctggatccctgctacttttcactgcatgggagaactggagagggtcctgaatggtaagctgtggggcaggtgagctggggagtaccagacacacccaagaaggccctgctccctgtggaaacagattccttaatccagggaaagctttcacatgcattatctaagttactcttcaccacagccctctatgctagattctgctattactcccattttatggataaggaaactgagcccagatctagacctgtcagataaatgcaggcaatgttatcctggcctctattcctcatcaccacaattaaagccaagggctggtttctcccatgtgacacaggcagatggcaggcagggcactggggaatgctgtgccaatgtccccatggtcaccacagtctcacacatcatgtgtctctttctggatcaataactgcatgagttgtcttgctatgtgtaggcatcttaagcatataggaggacaattagagaatccaggtcctcagaggctttgttgatgagcacatgggctggggttttaaagaacataagtgcctgtaataacagagcttaccgctgactactctggtgctctcttctctgtaagtgcattaattattgagagaactcatttgcagcacgcacacagttgaaagggctactttggacgctaatcagaaaatacacattgttgaagggagctaattagagaatcacacaactttgtagagctttgcctgaaaaactggatcaatcagagatattggatattcagagatacttgtcagacctgcaataaacaaatacatgtaggcattgcatgtaaagatgtaacactgagctgtttccattaggaaggatttttatttctcatctgtccatttcagtgactggagccctcttgataactacatctgaagtgggagcccctgcaggcaggatgcagatattatgagtcctatcttttgatttcaaacacgtttcttccttccaatctaagacctgcgcattctgcagtccagccgggaccacaatgctattactttgtggaggtttaataagccctgtgcattcaatggggagtcactaaaatagagatttatccccaaatctgttgcaacacattacaaatatgtcaagcgttcgtgattgagtcgggtctcagaaagagcatgaggcattcttgacctatatatttaaagaaccctggaggtaaatgtctgtcccatttcctcaaatatacaaacaacatgataaaaataatattgaataaaaataatttaaaatttaaaataaataaataataaaattaacaatttgtttatcagattcttaggaataaagacataatcactttcaggagattgaatgtataaaactacaaatcgcaagactggtcaattaaggtgtattgattcacatacaaaaggatgttcacattacaaaagaattattcaattttttcttaatgacagctctgttaatgctttcatcactttttttgcaaataatccctggttagagaagactgaagaataactaccataaacgaacattagtaattttcaatgccatcaagtttcataaagttttaaaaactcaaattctttcaggaacaaagctattctatatggcaagagattcctgaaccctccacattagtgtctataatgggtaggcctcatgccattatatttttctaagccaaagttcagatgcatcaagttaccaaaaccctttttacaagaatgccaaattatgtaattccttcctataagaatgttatgggccaggtgcggtggctcacgcctgtaatcccaacactttgggaggctgaggcgggtggatcacccgaggtcaggaatatgagaccagcctgaccaacatggagaaaccctgtctctactaaaaatacaaaaattagccaggcgtggtggtgcatgcctgtaatcccagctactcaggaggctgaggggggagaatcgcttgaaccgggaggtggaggttgtggcgaaccgagttgcactccagcctgggcgacaagagcaaaactccatctcaaaaaaaaaaaaaatgttatggcccatttattgtctaggtatttattactgagcttcccttggatccagttgacagtaggaagccaacgttgaattagaatgcctttaatttcagtgagcccagtccagtgtcgctggggtcatttagtgaattacatgctgccattcccagtgaaatcatataactactcatcatcacttagtagaataaagatatcctgaaaaagctaaatggagttttgaatcataaatcccaagtggtgcaacaatgtaataacacaatgacaaagaaatcatttgctgcatttcccaaaaataaggtcattgctcctgttgttcgcggaaaaaaattttcaagacgggtaataacattttgaaaatttgtatgctcatttaaattgtataaaatgcatttttagggcttgatttggccatatttatttttagttctcttatactttttttttttttttttgagatggagtttcatccttgttgcccaggatagagtgcaatcgtgcagcaacctccaatgcgcaggttcaaaagattctcctgcctcagcctcctgagtagctgggattacaggcgtgtaccaccacgtccagctgatttttctattttcagtagagacggggtttccccattttggcctggctggtctcgaacacctgacctcaggtgatccattgcctaggcctcccaaagtgggcggggattacaggccagttctcttatactcttgaatagtcctttccttctgttatgctggttgttctttttctgtgggtaaacttgaaggtgtttcctaaggttcaggctttaaacactgtctaaacacatatcactttcattgccccgctagcagagcagctggctaatggcagccctcacttggctcaggtggtctcagatcccctcagcctgcaccttcggggcctatgggtccaaaggggctggatgaggaaggctcaattaattattgttagcatacagtaacataaggaaagcaggggatattttgaagcaaaagaaacaagaatgttcagttactttagactcagaaaacgagcagtgagtcatcctagagctacgtttctatgataaaaatacctactagatatcttgtcttgaatgtccccagctgcatcaaactcagcaggtctgaaactaaacccttcatcttttgtcatcaaagtacgatctttcccctatacaccctttcacagttagtgatttcactgtccacacagtttcctgagcttagagcctgggaaggagtcacccctaaccccttctcctctgtcaccactcccacttgtcattgactctgaagccaccttccttggacccccttcatatctcacaatttaattccctctctcacatcccacagctgctcctgagctcagaccatcatcatatctctctccctgcacatcctttaccctgggccctcgctccaggaccacacaccaccagcccattctctagacagagttttgcacctggtatgtcacgagttacaggtgtgccaagatggtgagtccttcagacctcaaggtggccagaaacagctccctgggttcatcccagtgtactgcacaaataccccttgtctgcctgttcctcaaaaagtgggaagcactgggctggataaggcacactgtctgtaccaaaacagcagaaactcagacccagcgtcagtccagctcaagtcaggcagtgttggttgcaaagtggacctggtggctgggccctaattgtgctcatgctttgcaaggaggtgatgggatatattaaagccttgaaacagggccctgaagatgggaatgagaaggagtcaaggccaggtggctcatgtctgtaatcccagtgctttgagaagctgaggcaggagcatcacttgagttcaagagtttgagaccagcctgggaaaccaagcaagaccctgtgtctccagaatattttaagaataataattagccaggcatggtggtatgtaactgtagccctagctactctggaggctgaggtggaaggtttgcttgagcccaggagtttgaggctacagtgagccatgaatgcaccattgcactctagcctgggcaacagagcaagactctatctcttcttgtttaaaaaagaaaaaaaaaaaaaagagtcaagagatattttgccggtagaattaacctggagagaaaggtgtcagtgaaacctctgaggtttcaaggatggaaggatggtgataatgttacacaagatggagcacacaggagagaagcagtatttgggattgggaggggatggggttggccttcattaactgaattggtagactgtggccttcagaattccagatggacactcgtgtggaaatgcctagcaaagcacctaaaattcacatctagggctcaggagaaagagcaaaatggaaaagatagatgggaatgttatttataaagcaatgaggaaagcagccaagccttccgagagaggcctgagagcaggccactgaacactccgtatttagaggaaagacagagaaaaggatccagtcaaggaaagtgagaaagggtggccagaaatgtaggcagagatctggaagaccacagtgccctggcagctgaaagggccaacaacaaaaatatcaacggcatcaaatgctatagtaatgcaggtaggaagaggacgaagaggaaaccagagaatttggcaatgagaggtcagggtgacctttcagtagctgatggtgaaagaagctgtgtcagttcaggtttttgagaagcgcctagcaagacagattagacacacaaggaatttattggggaaattcttgtgaagaaggaagcaaaaggaagcaggaggtggcaaggagagtctggagaccataacagaggtccgacacctgtgagaggagaaggcgaaggagggattggttggaggcacgtcaggctgcggtgcacttctgagaaggctgcagtgaggctgatggggtatccctgagcaaaggatgcctgttagggagatcctgcatcgggcggggacggccatgagaaaagccctgtcacgcttgtcattggcttgcagcatcccagagaacacatgcctcccttcctgcagcagatgctcttggtttttttgttttggtttgggttttttgtttgttttgttttgttttgttttgttttgtttgagtcttgctctgtcacccaggctggagtgcagtggcataatctcagctcactgcaacctcctcctcccgggttcaagcgattctcctgcctcagtgtccccagtactgggactacaggcgcccaccatcatgcttggctagtttttgtatttttagtagagagggggttttgccatgttggcctggctggtcttgaactcctgacctcaggtgatccttccgcctcggcctcccgaagttctaggattacaggcatgaggcacaccgtgcccagccagcagatgctcttgaaggagacctgaggttatgtttgcgtggcaccacagaagccagagtgaccataagcaggaagtagaaacactagaattctggtctaagctgctgtcatctctatacacagcatggctgaaacagaagagccacgcagaagttagcaggtaggcagggcctggtaagaaggccataagctgtggcgctttcacccaaagccatcatgaagacccataactaagtggctggccaaggtcacaaggtttcatagaattgccaggacgagagccagctgtccatcttcgcttggcgtccctggctctctcctcaaaccctgtgctctccctgtacttccaatcacatgcggggtttggtctatcaccgttcgtacccagtggacactgatgcctttgatgtatgtttttctttcaacgatggtgtgttgaaggattctgttacctccattcctccatttctgtacaagtaagttaatacaagtaagtaagtactgtaggaaaatgagctcctcccgcgcccagggaggaggtaggaggacgattccacctgtctttgtggtgagcgctgaaggaggatcttgagaaaggcacctgtgtgcagcggcattctcatctctaaagcccgcatggcttcccgtgtgcacacaggacattctgcccatgtttaccaaatgaagacaccaactaactaccctgtctttccttctaggtgacctcatacatttgcctccataccttagaatggactttttgttaaaccgaggtggtccaggcaccagcagggacctgagcttaggacaagcatgcttggaacctcagaaaagccggaccctgaagcgccccacggtcctggagcccatcccgatggaagccgcctcctccgcctcctccacgagagaaggacagtcgtggcagccgggggccgtggccacattacctcagcgggagggagcagagctgggacaggcagctaaaatgagcagctcccaagaatcactgctcgactcccggggccatttgaaaggaaacaatccttacgcaaaatcttacaccctggtataacagacagcatgactggacagcggttgtaaatacaattcaaacaattcaatcaaagctaccttttttttacggaattccaatatttataattaaagaaaattgccaaaatatattaaaaaaaaaaaagagaaaatactgaaaccacagacagtgcaaagactctcctgctttttttctgtctgagtgtgagctccatccgcctgggcatctgattttttgggaaagaagtccagttttatgatcttcacaggctattgcatttttactgattttctacaaaagtgcatgggggggattaattaaaccttctgactggaagttctatcacacaagaggcaagaaagaaaacagggtgggtgggaaatcagcctatttgtgaatttaaaaggaacaccgatttgcgggcaggggaaaacttcagtcacgtttgcacacctttctttcccattagaaaccgggttctcaatttggtcttcttttgttgttaattaggatgagtgccgtcagtgaaggggtggggggaatcaatttggttttctctcttgtttcttttttaatttaatgagacactctttgcattttgtctaagcgaaataaaaaagaaaaggttgtctgcctttatttccatgtctgcttctctcgtcttctgccagtggcctggtcctccttcccattgacacttctgtttggaaacaccaggcctgaacccagagcccaattcaataaaccagagtcgatactaacaccctgaactcctcaggaatctccaggaagcacaaagaaggtgcagctcctgctctcaagctggagaggacaaaatgcaggctggtctccaccgcaaccagaggccagcccaagtattcgaagcccgtcgcaaagctctgccccttgcctgcccatggccagagttcaactgactgtggcctatgggccaaatccagcctcctgctgttttttaaataaagttttattgaaacaaggccacatgcactatttgctattgtctatggctgctttcatggcacaatggtagagctgaatagttgcagcagagatggtatagcccatgaagcctaaaatatttattacctggcccattacaggaaacatttgccagacccgtgctctggagtctgaaatgtagccccagcttgcgtgacaaggggcaagatcgtgcatcttaccctccatgacttttcctatctccactatgcctggtatgcaaatttgtgatagaccatcttaataaacattgcctgaatcctctgtaaccagaggaaagtgatgttcctctaaaatctaagtttttactttcctttccctcactttatctcccatgtggctcatcctaagagagaatttactcataaatagtcggaactgcattctttatcccacaaccctcacagggtttgctttatgaaagaggatgtaatcctcccctggctgcaacactccattccaggctcacttccataaaatggaaagataaacaggtctttgtgtcagagatttggcattaaccagaaaacatgatcaaatatccacagctgctcagtctcccaggctgaagattctctacaggcttccattaaggccaccaacatagactggtgccagttattaccatcttgggaacatattcagaaatgtctttccttccctccctccctccttctttcccatcctttcttccttctatttattttccaggcaggcccatttgtctgcttagattcagtgacacagaatgggtccaggaccatgtcaagaccacctgctgatgctagtgttagatgactccaggaatgtgaggtgtgcatccatggtttcagaatgtaatccgtgttgacgtgtactgtttgcatactctcagactgttttttttttatgcaaaagaaatgttactttctgggggaaaaaattaaaagtctatctttcatcaacctaaaacttctatatcccccaaacatagaagtttacctttttaacatttttctctcaacctgtacaaaaataaaaaaattctacattatgtctgcctctagaatggattgctttcaagactcctgccttaaaaatactcattaaaatcagtttaacacacaaacaattgtctcaaaagatcacctccttccagttcagataggggtctattattgctgtcttcaaggggctgcagattaaagggtagtgtatactaaaacgactgttattgacagtaataataattaatcttcctctagacctctacctgtctgatttgttttgtggaagtcaccgtattagcccaaatctgcacacagattattctatgttggaatggtgaaactcaaataaattctctatcctctggtcaatatctatagggtacatggacaatagctgttgaatcagtggactgggtttcctcctcagcatccatctggctggcagcctggaaaatgcccaccctcctggactaagcaaggccttctcttaatacgcagccaataagcctcgcaggactcagcactcacaatgtctccaggagcctggttttccatgccattcacatctgcctgatgcctgctatcctgcatccacgtccaccatgtctacccttgaagagaagaaggtggaacagttgagatgggaaaagatggaccagtgccatgacatgaagctggttaccagctacaccggataagcttttattccacccatcatctttgggcccttgctgcagagacccttgatactatcttacaacacagaaaacacactgttgcttaaattgctctttacgcaagcaggagatcaccactcagtagaggtccctctggtctggtgtcaggatccctgaatcactcatatgccaaaagttttatgcaacttttaaggacatggctgaggccttctagagaagctctgaaactctatgaatcaatttccagcaatgacacacagccttctgaaactgggataagactgggaaccaaaggactagtgtgttatagaccacttacccaccaaaggttcaaaggaaactaacagtttgtccataaaagtcctcttttaactttctaaagaacgtggtagagagtatctcagctctctgaggagcacctggaaagactaaatatcctcagtttaatatccagggcacccgaggcccatgttgcttctccacccattattccaaagtggtccatgagaggcagcagagtgtggctgcagtgaaagaaagattttctgcaggtcttggaaaccaagctgttgtaatccctaacaagagtttaagccaggaaggaatcttcaggcctgcataaaagctgtgtctgtttgctgtgggatgtttgtttgcttgaggaggagacttgtgatggcagggtcactgagtagcctgaagaatatgtggcagtgacaagccagagctacagcagggtcagatggcaactgcggacaggatcctcgctgatctcctcaccccctggcaagcagggactgaagactggataggcctgatgctaacttgggtcacctgagtgccatcaagggagtcagtgtacctgtggggagaccatcccccatgggtcattgcatttgtgcctgtctcttgagcagaggctttgatggtttctgttctgtgctgttttttcaaggatgcttgcatagcagatagccttggaagatagagatagtgtctccttgctgggcagaaggcagatttgttggctgacctagataataaaaacagcatctccatctgaggcaaaatttgggcaggtgtaccagcaacccccttccagagtttcttaggcattagacacagccaatcaggagtcacagcctctctggtctctgcctagaatctgggtggtctggggcagcctccctcagctccttcatctttggtccaagctcatcttttcaatgagggcctccatgagcaccctattcaatgccacaactcccccaggattcctgccccccacatctgctttagctcttgtccatacccttatcatctaactcactctagaatttatttattcataatggttattctttgttgtctgtctttcctctcaaggatgtcagcttcacaagaacataattctttgttttgtttacttgtgcccatagttcctagaaaagtccctggcacacaatagccatcttacaagtatttgtcgactggaaaaaaaaaagtttagggtttcctaagcttagagctcctcagctatgacacaaacccactgcgtacacagcatccactggactgctctgcctcaccccaagggccctgcagggatgggtagctggtgagaatatggctctcacgctcattgctataacttgagtaatgatattctcaatctctgatgctgccttctgccagcatctatgaaactgagacaagccagcttggtaactcacaagaaaagtataaatcccaggctttctaccatcctcaacaagcacaaaccagacatgggcagcaccagctccctccctgactccccagagggacaagtcacagcttagactcacaaactttttgcaatttggtgggaacggtattttttttctttctctctcttctcaatctctcaccatcaaaaaggaagaaaaatggaaaacttggtaaaagtgactgttagcacatggcgcggggtgcctgtttcatctctcaagaccagcttgacaaagccagaaagccctttgtgtcccagaaacttcaaccccactctaagaagaaaagataatgtttatcatcttcagcactggatcacccagagagtgctggactctgcctctaggaggtcatctttccatggagaagaaaatacctgccacatacattcatgtgtgtggtggcaccaggggcaagggtccttgctccaagatccttggggatggcagtcctggaccagaccgcaacctaggtgggtcaccaagcccactggacatcagagggcatcacagccaaaggagaggtgccattccctatcatgctgtgtgtgcctgcaagggttttattctcaagcaattaattaattcaatgtttccctcaatctttcattctctgaggttcccctaagggtgaccacctcactaaatagaggggacgtccccttgctactctgtgaagaaatgttttagcagtgtattaaaaagatgcttctgtttccggagccgaaagtataagtgtcttataaaggtgcaacttcctagatagcaaactgatggtgtggtatcctggttcaacccccaggtatggaaaaccaggcccctcaccctgagtggaagcacagtcgtccatgcaaccactgctcacacttggtagaacacaaatccactacacgcctgcagcacgccaacaaccctcaacatctgtttccccatccagggtgaaaggtggttccgtcacagcccagcaaggtgactgatgacagttctaagagatacactttgcacacgccaagtgaagcaacagccagagaaagatacagccactagaactgattttacctccatctagtatcaacccaatcctgtgtctgttcctctgtttagtcatgtgatgacagaacattcctcattgaaacttctacttctcttctccagttgatactctttgaaaggtctctcatcatcttcgagttagcagatggcattctgtccacttctgtagcaaaagttaaccctcaacaccaaggtgctgacgttttctgtagcaaaagtttaccctcaacaccaaggtgctgacgtttccaggaagaggactgggagttctttgcatggagccaagaataatgaagacgcttccaaaaggagttacagagcacctgggaaggggacattcttgttgctatggaagtaactggaaaagcttctgatgtccgtcttggtcaaggtccattcttagatgtgtttgcgtgtccattccgcagcatgtaaaaattgggcttattcaatgacctaggatcacaggaaaatttggggcgagcaagggacgtggcctaataggaagaacactgcactgagaggcttagtccaagcaccagctcctcggtaacaagccaggaggtctcacaaaaggccatctggttggacatcagtaaacagacctgagtggaccaggaggacgctaaggccctgcttgcccaacaaggagatgacctttctcagtaccaacctcactgggcagatatttgagctccttaaaagtgtgtggtggggggtaagttgaggctgccctccatttattttttgtacccctagcaccctgcacaggcatcagcccaaagtggtgaattggtgactgtttaagaaggatgtgacatgaaagtcagtgtgcatagatgtgtcgtggaacataaaaagggaggttctccatgtctgtgagctcagtgtgtaaggcagacttttatccttttaataaactcctaaactcacctaattattgttgtgtttgcattttatcctagagggaaaaggaagtttaaaagaccaacctgattatttgtaggtttccgatactacatgtgtgttgcacaaattctcacatgctgctgttgaaaagatggaccttccctcaggtccttctaaataaaaacctctctttaggcaaagctctacctgaacatcctcttgagtagatttctaaattcatgctggtggcccctgcgtgagagtcagcagaaaactgctttctgttgttgccatcattggtaaaaagtctgagggtctctccgtagggggcgtgtgcccagtccctccctctccccaggccctccctctccccaggccctgctcctgccttagtacaccgggcagcaggcacctcacatttctcatccttggaaatgtgaaccaggtgaccagagctgagccagctgaggctcctggggagccagcacatctgatgccaacccaggcaaacccttagggaccttcccaaatgcccatcccgtctccttccctcactctcagcagacagacacccctgacatcaaaggccatggtgtatctttcctgttctgctcccaccaccaaactcctcacagccacctccttcctgaccctgcctcttcccatccataactcctccctccatccacactctggatcccagctgctcccaactttacaaactctcaccctcccttctacacctggatcttatctcatacccacgtgtgaagacattcaagtctcccccatcaataaaaacgccacccactttccctgaactcactggagacactgtcctacatctccccttcggtcttagtccattttctgttgctcataacagaatacctgaaactggtttatgaagaaaaggaatttatttctccaagttatagagtctgagaagtccaagatcaaggggctatattcagtgagagctgtgttgctggtggggactctctgaagggtcttgagatagaacagagcatcacctcagatctctcttccttttttttgttttttttgttttttttttttgagatggagtctcactcttgtcactcaggctggaatgcaatgaatggcgcaatcttggctcactgcaacctctgcctcctgggttcaagcgattttcctgcctcagcctcccgagtagttgagattgcaggtgcacaccaccacacccaggtaatttttggatttttagtagagatggggtttcaccatgttagccaggatggtcctgattttttgaccttgtgatccacccaccttggcctcccaaagtgttgggattacaggggtgagccattagcaaggtccttttttttttttgttttttggtttttttttttttttttttttttgacagagtctcactctgtcgcccaggctggagtgtggtggcgtgatctcggcttactgcagactccgcctcccgggttcatgccattcttctgcctcagcccaccaagtagctgggactacaggcgcccgccaccacactcggctaattttttgtatttttagtagagacggggtttcactgtgttagccaggatggtcttgatctcctgacctcgtgatccgcccgcctcggcctcccaaagtgctgggattacaggcatgagccatcgctcccggcaccagcaaggtcctctttctccaaattaccttcaaaggtgtatgttcccagagttgcaacctcagtcctgtgcattactcaccctgggcaatgttagcatttcatcttcaatcacagctttagttaccgtctatattctggtgattcctaaatttaaatcttcagcctgaacttttctgagcttccagtccacattcaatagcctccagacacctctgcttgcccatcccatgtaaagctcaaactcaatctaatcaacactcataactacatgtgaccccactgctcctggatcccctcttcctgagtctgtattgcaatagatggcattgccatagcactcggactgactgacaattgcaggtgtatggaaacccagcttcctggcctcaagatggagcacagtctgaatttttccaacctttcctcctctaccctttttctgatttatcttgataacactttaataaatcactgcatataaattcacatctcgagttctatttctggggagctctacctaatgcaagttcttatcttttattctatccctgtacctatcctagtgcctagtatacattcaatgttcaataaatatttgatgataaataaataagtagatgaatgaataagagtagatgacattgtaaatgtgagtatctccttccttattctcccccgtgaagtttctctaggggccaggtgtggtggctcacgcctgtaatcttagcactttgggaggccaaggcacattaatcacttgaggtcaggagtttgagaccagcctggccaacatgggaaaaccccgtctctactaaaaatacaaaaattggccgggcatggtggtgggcacttgtagtcccaactactcggaaggctgaggcaggagacttgcttgaacctgggaggcggaggttgcagtgagccaagattgcaccactgcactccagcgtggacaacaagagtgaaactctgtcccaaaaaaaaaaaaaaaaaaaagatttatctagggcgacgcttactgaatactatctgagcttctcaatgcatagtgcaagtaaatcttggcaaaaagtaaaggagaaagtataagatcaaatcttcctgaaatgcaaaagtctctgctatgctttcaaggagacgtgagccagcctgagtctgctctgcagctgcccaggagccaaggggaaggaagtgggaagcagcatgatagccactgcctctgcatcccacagcagtcagaacaggcttgctctgggttcaaatcttcccttgtgagcccccctgcagaggacgacctgagaggacactgatacccaggtactcagcaaatgactttttcaactggattgacagcctggagggagaggcgaatccgtcagggctttgaattcacagagggggaagtaatttggcttcttcaagcaagcagaatgggctcagccaggaagcatctaattttagcactatctttgatgacaaaatcctttcagggtttataacctaatgaggatttacatttggactagcagtaagggctttcaaagatagaagatgagacatttatagatctcagaatacatgtggaacctttaacacatttccagaaatttgagtttggcctccttttaaggttcctttgtgaagcccttctttgtggctgattcatgctcccagcttcctgctaggatgtggcccatgtttctaacacctggggcaagagcttgttgacttgagctgagcacaatatttcaaaagagggccaaaaataaattgcattgcacacaaagttaacagaagcttatctttggactaaaaacaataaatttgggagaatgagcttcattggagccttcctgttgtacagatggaagccactctgagaccctgaacacacatcacacgaggatcttttcatcaagcagttaatcctgagatttcactcaacagcccaaagacggcttatttgcttttctttaaccatctcaagactttttcactgacttccccatgtgcaccaaccctgaagggaacttaaaatgcagtacttaagagtgtgggatctggagccagaggttgagttcagaaccgcgctgcaccacagataagcttctgaccgtggacgaggtactaaccatggctcaatgttcttatctttaaggcatgagaaataacagtaactcactccatttagggatattttgagttatcaaatgagttaagacatataaagggcttagaatagtgcgtggcacataacaagttctccaataagcattaatgatgatcgttagccattcttttattctacttacataagaccatgcatgcttagtaacacctgcccatggagaatgtctcagccaacatcccactcagtcatcccaagcactgtctcaacatttgggctgaaaagggtcattctgttatatttgtacatatcagcataaggcacactcccacggcacttttgattgggcgacagcccgtgtatcctgaaatcaattcctagcccaacagcatatatgcatgtgtttactcatgttcaaatgcttaattgtgcagttctttgccgatctgataccatgtcttcagctcattttaaccagcttcattaataaagttaattatattgacatctatttaagaatgaggaggaggagaaaagaagagaagagcagctaattaaagccaccttctaaaggatttctaccaatatgtataaatggcagcatttacatcttaagcttcaaatgaaactgttctgttatcagcctaaaagaaacatgtttaaggttttaaatagtctttgttgccgttgctacatgctctcatttatttcttatgtattagacttaataataagtaataaaagcaagtttgagtttctcaaatgttatatcttttgcaagagccaaattattaatattattattatttgagtcagagtctagctcggttgcccaggctggagtgcagtggcaccatctcatctcactgcaacctctgcctcctgagttcaagtaaatctcctgcatcagcctcccgagtagctgggactacaggagtacaccaccacacccagctaattttgtatttttcgtagagatggggtttccccatgttggccaagctggtcttgaactcctgacctcaagtgattcgcccgtcttggcctcccaaagtgctgggattacaggcatgagccgccatgcttggccatagccagattatattgagtaatacttcagtaagtaaaggaaacaattctgctggactctagtggcatatgaaagtgtaaaatacagtacacccacatggaagcaatcctttctagcaatcactagagtactgcttgtccaggtttttccaaatgcagcactccctcctgtcctttctgttctccttaacttttcagcattctacgttctgggggaagcaggggagagaacttacacgcagtttaggacagggttcctggcacaagggctgcctacagctcttgcagttacctctgcctcagtgaagtcacccctcatggtctttgagaattcttggttgacagtcattgctgaagtccgtggtgtctgccgtggcacctgaatttcacactgaccttccaggcacaaggtccactttggaggcctgctcctccctaggatgtgcaggaccctgtggcctctctggctaattgcttcccccagctgtggtttcagctaccccagggccatgagctctggtcccatcttaaggggtttgcagtgcttgcaggcttccttatggagctccccaaacctctcttcgtgactcctcctcattagagtcttcactctgggaggaggcagaaatcatggtgggtggaagggctcttctcagactccccccagcaagctcagttctggcctcattgccttctgagccccttgcccgttgaactccctttttcttcgcaagtaaatagctgtgtgtattagttctctttcatgctgctgataaagacatagctgagagttggccatttacaaaagaaagaggtttaattgacttaacaatttcacgtggctggggaggcctcacaattatgatggaagttgaaaggcatgtctcatatggcagcagacaggagaagagagcttgtgcagggaaactcccctgtataaaaccatcagatctcatgagacttattcactatcatgagaatagcacaggaaagacccacccccatgattcaattatctcccactgggtccctcccacaacatgtgggaattatgggagctaaaattcaagatgagacttgggtgtggacagagccaaaccatatcactgcatttgcatcttactttgtgtgcccccagctttctggcttattttatgctttctgtgttcaggcctctgagctttcttgctgaaactcacgaatccttttgtctctcaacaaactccagcacttgttcatctatatcctttagtttttagactgtaatctgtagagtgaatttcaagagcctgctttggaactcaaaaatcaaaaatctggcctttatcctagacatgatcattccttcccttgagggctgggagatagaaagctgcctgaatgccagtggaagatagagggaacaaggggaaaacaccaaaatgattctctgccatgcatggccatgtacaatagacatgagagcctcccagaaagacatgttgaagccctaactccagtacctgcgaatgtgacctggaaataggctctcgcagttgccaccaaataaagacgaggttgttttcaactagggtgggccctaattcaataaaactggtgtctttataagaagaaggaaacacagactgacaagcagggaagatggcaatgcatctgcaagccaaggaacaccaaggattcatggcaaccttggaagtcaggaagacacaaggaattattctcacctacagccttcggagggagcatggctctgctgacctgacaccttgatttcagacttctggcctccacaactataagagaataaatgtctgctgatttaagccacacagttggggtcacttcctacggcagccctgggaaactaatacaaggaggtagccagaggctggtaccatcatgaattgctagcctacgccacctctcttctctgctaccagacttcaaaatagatgagcatattagtgaatcatctttcagatgcaagtgagtggacacccagcccatcttggtttcagcaagagagaaaatttgttggcttaaccaaaggtctgaaaatggattttatcagcttcaggagcagctggatgcaggggctcaaacagcattgctgttacccagcacctctgtattttcccctgggcttgttctttgctcttcacaggtcaaccctttcacttggtctattgctctacacttttattccttctttgtggttgtttaccaccaatttccttcatctttctctgctcagccaatcaatcaatcaataatcagtttttatattgaaagctcattcagcatgagacagtgttgtacagtggttaagagcataggttgtcaagcccatttccctgtcaactgccttctctatgttcttgggagagttatttaacccctctgtgcctcagttgcctcatttgtaagacagggatcatttaaaaattgggctcctagggttgctttaagaattgagttagtagatgttaactgcatgcaattcagtgagttcatatgcattaaatatggagaacaaggcctgacacatagtaagcaccatatatgtgttccatatttatggaagtagaggcacactatgcatgattgttgctatattgatggtataacattacaaaactagcttttgacttaggcttgccatctctaaaagttccatatattaagaatgtgaggctctgagaggtttattatcttttccagggtcaccaagctagcagaagtgtagccaagattccataagaggttgagcattttcactatacatgtttggtctctcctgcactctcgctctttctcttctgtcaaccatgatacccaagtctccctcaccctaaaaatatctttcctccaccctgcttggacctaaatgttccctatatgccctaaagtttccatcgtctgtctccccctttatttactaggatcccataaaagtaagtggctgatactgagcttttccacatttcctgtccttacagtcttcactgaccttcttactctttacaaccttattttctttctggaattctcccaaaaatatgctcttgaaggtcaccaaacatctctcaaatatcaaatcaaatggcttttcctaaggccatcttcccccgacctctgtgtaaagggtgttccttttatccatggcctcttccctcgagccctctcccacctttggctccgtttcacctcccactggcccatggctttctccactgcgaccttgaggcccccactgctccaaagcagagtcatcaagtcagcaggaaagaaagaaggaagatgttaagtacttcatcatctgagttttgtcttttgttaagctctaggtcaaagaaaagaagaaaatattttttaactacttgcttcttctaaggaaaaatactctcttcaggccaaaagagagagcatgggaaatgaaaagaatgaagtgcatatggggtttctcagaaggaaccatgaacccacccaatgactggccccaaggggattgtcgttgtttgacaatcttagagttaaggggtcctgagtgcactttgcctcctgctaccctgggcaccaagacaagtaggaacaggtgtctgctcagaaggctgaggccaagggcatgaggaaggctcacagtgggcccccgcccctgctgacccataatagagtagagaggaatcaaatatggcagcagacaatggaggaggggacactgtccttgggtagggtggactggccagtggaaccaataagtgccaatgggacaacactcactgcagaggaggccaatgcctaccgaggccaaggaaaacccgtctctcccctgctgagactgagaagccgccatgtcagtccctggaaggaatgtgtcccctctgaagtgaaggtggtgggagaggaatctgaatagtcattgtgcttcctgtgaattagggagactctatttctgctccttgcaagaaaggggcctccagagagaaagtcagtcacatttctagcacaccgaaggtggtggattgagaaattcccgcctgtcacagaagcagcctttttctacaccatctttagatttttcagatcctgttattccttcagcctgattgaccagttagagtctataaaaatcagggttagatctgagcaacaaaaccatcagagtgatagagaccgagagacagagagagactatttaaccggcttccatccttgactgtttaaccagcttccatccctgtgtgaggtcacattcccttataataaatcccttatgatatgggatttgataccttatgatatgattatagggatttgatgccacataatgatggaagctagttaaatggtctctgcaaggctgtcgtctttgtgtctggtgctgggatttaaagtccacggggaggcagtgaggaagaggggagggacttgaagtgggagagagtgaggccacaggcaggagccagaatccaggagaacagactggaacctggcgtggggctgtgttctgaacatcatcacctcttcaccttgtaggcaaaggagggattccctgcccaggattttgagcctggtcaaacacaggacaccccaacactgaacaggtgaaattgacaggttgggaggaggacaccatataccattcagtgccacacaggggtttcacccaggagctgagtgaacaagaaaaggctaagggaggcaggctctgtggtatcaagagaatggggtgccccttggcttctgcaggaggagatggttcctgcagagaacagagtcccctaccaacaatagcaggtactgtgcctggctctggtattagggagagcggcttagccaggacaccttctctgcaggagcaccgtgggatggggaatttgccattaggctgggttccccagatgtgaaggcacacacataatattgggctgtagctttaggcctcataccctagtctctcacacttctaggcctcaacttcagtgacagggctgggggttctgcaggagaagctggctttccttgtcatgaggctgagtctgcctgcagcccaggagttggagaacagagtgggcattcagcaggagctggaggctgagcagccagatgagccacaggtgaggacaaattgcacaggcagtttcagagcccagccctgtgcattggaggaacatagctgttgctatgttccaagggctgaaggaacatagctgttgcttctcctttaccttcaaaaccttctgcaaatgccctgtggcccacctccaacccaccctccaaggggagcagaattctggaaaatgtaactccagcgtagccaagtcaacgtgtgaagccaccacaatccctgcctttcttccacgttcagtggaagttccatttcctgattatctcagctgaatatgacccctttctcctctgaacctcctgatccttctctaatggcacttttcactttgtgctagataataaccatttgtgattacattttatttcccctaataatgataattaaaccaggacgggccagatcttgccctgtatctcctctaattctcccaacaggcagaaagcaagcatgatgatccccctcttccaggtggagaacactactcagggaacatgggaaactcacctgagacaatggcagtagaaggggcagtgatgtgagcctgaaacctagactctctgctgacactcagcctactcaccagctctcagctccccaagggaaagggactgtgccttatctgtgtcacttgcatgctgactatttctgtagcttgcacagaatagtaacccacttgggattcattcaaatccttttcctgtgtgcaaagcaaaggacccatttttatggagaccacaactgcaattgattaaacctcaaatcaccatgcagttgatattgactggcccctggcaatgttcgtgtcctcaaacgatataatgactcttctgatgacaagcttttgacttgggccccctgaccatgcctcaggctccaggctctgtgttcagtgcacacagtcctttgtttgatgtgcaccacagcccccatggaaggtgttactacccccattttacaagtgaggaatctcagacttgcaaataaccacttgcccaaggtcatggacttatgaagtacaaaagctggagtatgaagcacccagaactccttatcactgtctcaggggctgctcttgcaaggtgagaaggcttcaccttgtaccacctgccagattctaacatgtctcaatgcctttctcccctccagacgcctcagctccttgcttgccaatgctgtctactctgtgtctcaaccgccgcttgtttctgtgttttcttgtccatctctgcagccgttgctggggccaggtgctccttctctcaatgcagtgttctcccaaccagccacttggactccagtccttctccctccatcccctccttcatattcctgaaaactccattctcccgaaatgggaatctgatgacataagtcctccactgacatttttggtgacttcctgttgccccaggacatgacactcagggtcccctggtctcgctctacatactacacagactcaactccccagctccttgcagcagtaactccagaactcaccatggctctccatgcctctgagcttttgctcaagggcttctctttattgggaacactttgccatgcctaactcctacccagtcttcagaatgtcccttcaggtgtcaccctgtgagcccacatctgggacagatgctcctgagtaccccgggaaacctccatcaaagccagggtcaccctgagctctctgactactctacttgtctctcctcttaccagatggagcttctgggtccaatgggttcatctattcatcttggcaccccccactggtctagcccagtgcctggtaaacagtgggggctcaatatagttttgtggaatgaaaacagtgatgaaacagcaactgcacattgattgagtccttatcacatgccaggaacctagaaagcccttcccaggcattatctcatgtgatcttcccaatatccttatgaaacagcaatcttcattttacagatgctgaaacagtggcacagagccggagagctgtaataacttcccccatgctactcatgggtggctgagccaggcgtggggctccatggcttggattccatcaccacgcgtttcccagggctgaccaggcaaggctttgagcacccagcctgcaccttcggcagatgagaagctgtgctctcggatccatggcaaagcaagggttaacttatctaaaatacgctgtgctgctgtgtagggcccttaggagttagcagggtcttgtttaatgagggagcatttcccagggtctggattgcaggaattaacacactggggtcaggtcaagttacaaactcatgggaacctcctcagcctcaaagagaatcaacagcttgataaacaaaacaacaaaaaaaaaaagacacctgcttaacagagagcccgagggttaacagaaaggacattcatactaacaaaaatttcaggctgataaacgttggaaatgctgcccctctcgtcacttcaggagggtttattgcttcttggggtgaccagttgctccttgcagaagaggctattcatgggcccaagccctgtgagaccattaagtctttttcttttttagttacttttctgaatgtttttgagttttctcattaggatgaaagcaaattttatgctgtaaacaatttaaacatcctctaccgtgtccccattaagcaggaagtcctctcacatggtaagcaatggctatttttaattaagtttcactgctaatgtttcataattttcaagtaactcttcaagttgatattttcagccaaagggtgctcttgggtttaggcccaaatgaacaatttgtgaaagacttagacttacttgacccaaatgcgttcagcttaatgagaatttttaaaaacatttttacttttttttttcctgtttatcttgggtcttgggttgattactatctcttacaaagctggcatgccttctgcttcttctcctaaccactcctctttgtcctctgcattcaagatactacctttgtacaccataccagattcgccggaggcagggctcctggcctcttgaatttaaggagggctcgccaggatcccgcatccttgttccttcctcagactcaagtgagggggcattataagttcatagatgtcaaccagaatgccttcatggaaacattatgacattctctcaaaaaaaaaaaagtaaaataaaaaacaacccagttcatggtagatataaatatactgtatgatcagatgtcaggcttcctcatcattggcatcactatttggatatttgcatctgaagcaacatgatttttggtgtgttatacaaatgtaagccaccataagtggacacaaagccctttggcagcaacagcagtctgtgtcctcaaccccattcttgggctgctgcaagcacgggacctttgatagtttaacatccatattctgctctctacaaatgaaaaagatcagaggcagaagtcatcatgaagatactgcgagtgcaggtgagtcagccaaagtcacatacctccaatgggcagccaagtggaggtcagaacccatgtctcactgactccagtttctgctttcgtccactcaaaaaccagaatggattctagaaccaacccagccactgaaataaccaggaggaaacaagagccattcctggggaggagaggtcaggagtggcagtgagacttatgcggaactcacattggaagaaaacggcacctctgagttactttaagggacctctgtcttagcacaaatgaagctaggagtacaattcatgaatagctttctatatttcagagtcagtactttgaggaataattgctggagactggcttaccgtttttaaatcagccagaacacaagtggttgtccatccagtgcagtcagtgaatggccagaaagaaaaggacgccgcagaaccacaccagtggaaagaagagggcagagacagggtctcttcagtggccccaactctcagggggaaatggatttgcactcagtaccagaaccaggctattctagggtacataggaatattggtttcttaagcacatattatagtcaaagtctcctgcctagccagctgtgtatacatcttccctagcatgatttgattcttcccaagtttttccttggttacctctgtaaggcaccatggagaggcccctt
